United States Patent Application Publication US 2026/0191916 A1 - sequence listing, part 33

SEQ ID NO: 89 - DNA, 6334521 bp, Bacteroides thetaiotaomicron (residues 4,223,015-6,334,521 of 6,334,521)
  source 1..6334521: mol_type = genomic DNA
gcaatacgtaaagtcttgaacgaactgaatattaaatgctgatctgatatactgagaagtatcgattctccatacattttataaataggtattcctccttcacctttttgtcatgtctcccatgaacaggcagatacaaggtgaagggggattttttagttctttctatttttttgctattagcataatttgattagctaatagcaaaatccgataacctaatagcatatttgataacctaatgtagtataaaagtgaaacgcttttccttcatcctgtatccacttgtttatagtgctttcgagcaaaaggtgaagatgaaagtgcatgtttcaacatatgttgccatgcactctttaaacttcccaatgtttgaaaataaacttcttgatgtttgaaaataactattaaagtgtttttataaaacatcctattgattgtacataattatacggtcgtttgatgtaaaatatcggactgggccgaaatgaccgctcgatttagataacacaaccgcttgatttatgcaaaagttgcagtcatttgtggtaaaacgaccgtttaattttctttctcgtgatgccggatttcttcgatggaatggggtaaaaaacaaaatcctccacaaaaaatgcagaggactttggtgatcgcgacaggattcaaacctgtaaccggctgatccgtagtcagctactctattcagttgagctacgcgaccttgttaaatgttggtagaagtgaccgcgacaggattcaaacctgtaaccggctgatccgtagtcagctactctattcagttgagctacgcggccattctgtttttccgaaaaagtgatcgcgacaggattcaaacctgtaaccggctgatccgtagtcagctactctattcagttgagctacgcgaccattgtttcgttttaacgggtgcaaagatacgtacttttcccgaattagcaagcattcggcgacttttttttgtagaaaattattcgatgaaacggtaattaaacagttggaaaccgatacttaacccgacattccactcccttctcggtgagctataatgatttacataagcagagatgtctccgaacggtaattgacacacaacagaaatttctcctaaatattcgaatttagagaaggcttttccataatatgccttatttaatgagtttctttcaatcggatatataggcataaaaccataaaattcacctcgcagatggaacatttgattgaggcgatagatgggacgaatgccggctcccacaaattgattggcgcggaaagcttcattataggtgagtttgctatgtagagtaggtgaaaactcacctgcttgcatcatagtcgccgtataattctcggaaaagttcttggaagcgtacaaagcttttaaataccatcccaaaacccagtgttcgctcattgtatggtatttttctttcatatatgataattgcagccaggaatggtgttctttatttatttgaactcctttggtctcttcaccgggatagaatctttcccgtcccatgaatatctgtgcaacaagagcttctttgtagccttgtgtcgggtattgccgtgaattaagcgtacttccattgaagctgatagagccgccgaataaatcataacggcttctgtcgaatctgtctttctcaaaatcgatgatatttctctggaaatatttgtcttctattctggcgatccctattccaaactcagctcgtttgcttaaaagaaaaggtagtccgacctgaagtttaaggaagcgttcgtctttctgattaaatgctggcttgtcattcctggaaaataacttgtctttcttaaaatagtcgaaagtagtaatagatgcgataaagcggtaagaggtcgggatcgcagtagaaaagtcgatcttagccatgaattgcgcattattatagactttcccgagttgaccgtcaaaaagaaattctttcgcatagtaatttaaatcctgatagctgagaccgagataaatttggttcgagttggatgtggaaatattcccacctaatcgtacggcaaaattattctccagtttgacttttaaatgcaggtcatatgtttcatcctccggattgtatacggcatgcgggatgatctcggaaatcatgttgtctgaaagcagccggaaatagccttctttcaagttttcgtaagtgaattccttattgtcagagctatgaaattcttttttaatatatgcctgttgttggggattggctccatcaataatgatgtttttaaagcgtaattccggatagttgcttcggtataccattcttctcaaacgtatattatccaaattaaccctcctttgtatacggctttttatagaatccatcatgcttatggttcggttatatccgatatcatgcaattcatctattcgctggaaatccatcaagctgacattgtcatatttgaatgtcatcagaatacccattgaatccggaatagaataatcggttttttgcatgaccatgttttctatctggctcatgaggtcattttccttgggtttggtggggtttgtagataccacacttccaattataatatccggatgaaaatcgtctctcataacgtctgttgggaaattattgtagattcctccgtcatatgccagcacattgtcaatctctataggcttaaacataaagggaaagctcatggaagctcggacggcatctcccaaatctccgtttctcattacgagttgctttttattgtagacatcagaagctatgcatcggaaaggaacgaataacttgtcgaaatcgcctttacacgaagctgtagcgcgtgcatacaaatctacaaaaaccagattcatctgtatgggatttactacgcttgtgggcagaaattgtggtttgaagttttttaatgagtctttgaatgagaaacggatattaaaaaactccggtgtcgggacatttttcttgaagtggtatacgtatttctcttctatttgtcctgaataccatcttttaaagtcctctgacttcaataattcttccatatcatcaggagaataccccatcgcataaagagagccgataatggcccccatggaagttcctgtaatataatcgataggaatgttattttcttctaaggcgcgaatgatgccgatgtgtgtcaatcctttggcaccgccaccacttaagacaagacctactttttgggcgcagacagtcggcatgaataaccatatagcaattaacactaaaagtatttttctcataacccaaatcaaacaattgaagtatttatcatttagtgttcaaatatatgcaatactttccaatttatcgatattttagcgttcgttttatgatgaaaaaagagcattgcaacacgttttagtgttgaatgctctttcattgatttatgttataaataaaggggcggtattaaatcagctcaatactgcgcttcacgaagttgttcagagcttcaccttttagcatattgttctgcaataaagccaggtcgatgagttgacggattaccttgttgttgctggcatatcctgcaaagatgccttcttttttatttttcagttcatcccattttttatccagctcattcagttcatctttctccgcagtaggaatatcttcttccttcttgtccttttggctgtcttttagttcgttgcgacgcttgctgacactattcatctctgtttgtataggagctacttcagggtgacaagctgcttcttcttcgtcaagcacttgcttgataagcttatggtcggagttcagaaccagattgaacatatccggcatctccccatagaagctcattccggcctgaatatttgccatttccttcatacgacgcatatactcgctttgagtaatcatcaccggagctgaattgtctcccaatgcctgtgtcattacattgaactcaactttatccattttgggtaactggctcttgaaagcagttgtgatagcttcttgcttttctccttccagtgtctcgtttttcttgtcttctttgatgataaggttgtcgatcacatcgctgtctacacgggtgaagcgagatttctcaaacttctgttccagcatacttaccatagctacatctaattgaccatccataagcagaacattgtatcccttgttggtggcagcctcgatataactgaattgttcatccttattattagcatacaaatagatcagatttccatctttgtctgtctgattatctttaataagggtctgatactcttcaaatgtataatgtttgttatctgtatcggtgaaaagggcgaatttttgcgctttctcatagaaatcctcttgagtaagcatgccgtaattgataaatattttcaaatcattccacttctcttcaaactgtttacggtcgttcttgaaaatcgattgcaggcggtcggaaactttcttcgtgatataggtagaaatcttcttcacattcgagtcgctttgcaaataagaacgggatacattcaatggaatatccggggaatcaataactccatgtaataaagtcaggaagtccggtacaattccttctacggaatccgttacatatacttggttgcaatataactgaatcttatttttattcagctcaatattgctctttactttcgggaagtagaggataccagtcagatggaacggataatccacattcagatgaatccaaaataatggctcgtctgacatcgggtacaacttggtatagaacgacttataatcctcgtccgacagttcgctcggcttacgagtccacaaaggagtggtgtcgttaataatattgtcttcagtggtttctacctgttttccatctttccattctttcttcttcccgaatgcaatggggacaggaaggaagctgcaatatttcttcagaagctcagaaacacgtgcttcttcgaggaattctttgcaatcgtcatcgatatataagatgatatctgaaccacgatctgccttatctacttcttcaatagtgaattcagggctaccatcgcaagtccattttatagcttgtgcttcgtctctgtaggatttggtgataatttcaaccttttttgcaaccataaaggcagaatagaagcctaaaccgaaatgtccgatgattgcatttgcatcatctttgtatttttccagaaaatcattcgctcctgaaaatgcaatctgattgatgtacttttctatttcttctgcagtcaggccaataccacggtcggagatagtaatagtgtctttacctaattcaacgtgaattgtcagatcgcccagttcacctttaaactccccaatggaagcaagggtatttagtttctgagtggcatctactgcattagacactaattcgcgaagaaaaatttcatggtcactgtacaagaactttttgatgatagggaaaatgttctctgttgtaaccccaatattacctttttgcataataacgtatatttttttggtttatttattagaatgtttttaattgatatttgttcagatagagacaaaaaaaatgccagaccctaaggtctgacattctggcatattttatgacttatcttatttaagtaatcttctttcaagatgcaataactttcatctccaattcacctttctctttattcagagagacttgaatgacatctttttctttcagagaagaagttataatgagttctgacagtccatcctccaaatgggtttgaatagctcgttttaaagggcgggctccgaattgcacatcgtatcctttttcggccacgaatcttttagcttcatcatcaataactagcttatatccaatagattcaatacgatcatatagtccttttagctcaatatcaatgattttcgtgatagcttccaaagagagttggtcaaatgttatgatttcatcgacacggttgataaattcgggcgcgaatgatttatttaatgctttttgtataacacttcgcgagaactctttatcatccagacggctttgtgtagcaaagcctacaccacgtccaaactcctttaactggcgggtaccaatattggaagtcatgataacaactgtatttttaaaatcaaccattctgccataactgtcagtcagacggccttcgtccatcacttgaagaaggagattgaacacatccggatgtgctttttcgatctcatcaagcaagacgatagaataaggtttgcgacgtactttttcagttaattgtccgccttcttcatatcctacatatcccggaggagctccgaccagacgtgagactgtgaatttttccataaattcgctcatgtctatacgaatcagtgcatcggaagccccgaacatatattttgccaattctttggctaaatgggttttacctacaccagtcggacctaagaacataaaggttccaatgggcttattgggatccttcaatcccacacggcttcttaaaatagccttgaccagtttctctatcgccggattctgtgcgattactttcgattgcagatcctccttcatgccagccagcttgattccttcggcttgtgccatacgctgtaccggaatgccggacatcatagaaataacattggcaatttcctctgcatcaacagtctgtctattctctttcagactgttttcccattctcgtttcatttcgtccaactgaagcgtgagctctttttccttatctcggaaactggcagcgagttcaaaattctgcgatttcacagcttcatttttcttgcttttagcttcttcgatgagtttttcctgctcttcgatttccttgggtacattgacgttggtcagatgtacacgtgatcctgcttcatccaaagcgtcaatagctttatcggggaagttacggtccgtaatataacggtctgtcaacttgacacaagcttccaatgcttcatctgtatagttcacgttatgatgatcttcatatttatccttgatgttacgcagaatctgaagagtttcggcagcagtagtgggttccaccataactttttggaaacgacgttccaaagcgccgtctttttctatattcttacggtattcatcaagggtagtagcaccaatacattgtatttcgccgcgtgccaatgcaggtttcagcatattggctgcatccattgaaccggctgcagaacctgcacctacaattgtatggatctcatcaatgaacaggattacattcggattcctttgtaactcgttgagaatggaacgaatacgctcttcaaactgaccacgatattttgttcctgccacaactgcggtcatgtcaagagctactactcgcttatcaaacaagatgcgtgagactttcttttgaataattctcaaagcaagtccttcaacgattgctgattttcctacaccaggttcaccgatcagaatcggattgttctttttacggcgactcaggatttgagccaagcgttcaatttccttttctctgcctactacagggtccaaacgtccttcttctgccgcttttgtcatatctgtaccgaaattgtcaagtacaggcgtgtcattagccggtttttttgaagctgtttgcgcctgttgctggcgttcttcagaaccgcttccaccagatcggggagaagacatttcttcatcatcatcgtcttccgggaatcccatgccggaatttacatccggttgcaatgtggcttgttccaacactttcacgtaattaacatcattagcttcgagcacggaagcagccatattgtttctttctcttaggatcgctaacaaaacatgctctgtatcagctatattacttctcattccacgtgcttctaaaatacacatttttaatatttttgccgcgtcattagacaacggtatctctgcatcaggcaatagcatatcatcagcttctgtcttcagccgagcttcaatctgctgctttactgcagctaaattggtgttgagttttgacaatatctcgatagcttttccttcaccgtcacgaagcaatcccagaagtaggtgctcaggtccgatatgcctactcctcaaccggttagcttcttccttgctatagacgataatgtcggaaactctttgtgagaattgattattcatactttttccttttcttctaaggggttatttactggcaaatatacgcatttaatcaagtttgtattgcatatttgctttatttcttatatctacaaatggcgtgccataaaaacaatgctttgtattatatatataaggtataacaaataccactccctgtttttcacagatatagtctccttaatggtagtatttattctttttctcatttctttttctaatattaatggttagaagtcaatccgttccttgaaatttttaattttaataactaaatatagacaaacagactgtccttcaagcagaaaaaaactttcttcggaaaaactttcgtatatcgtggaaaagtagtactttagcgtggtttttcacagaccatacaatgtataattaataatcattttaaatgcttgaacaagacagaattataaagattaacatcgaggaggaaatgaagtcatcgtacattgactactccatgtcggtcattgtttcacgtgcccttccggatgttagagatggatttaagcccgttcaccgtagaattttatacggaatgatggaattgggtaatacttcagacaaaccttataaaaaatctgcaagaattgtgggtgaagtactgggtaagtaccatccgcatggagactcttcagtttattatgctatggtgcgtatggctcaggaatgggcaatgcgttatcctttagtagatggccaaggtaactttggttctgtagatggtgatagccccgctgccatgcgttatacggaggctcgtctaaacaagttaggtgaagcgatgatggatgacctgtataaggaaactgtagacttcgaacctaactttgataatacgttgacagagccgaaggtgatgccgacccgtattcctaatcttttggttaatggtgcttccggtattgcggtaggtatggcaactaatatgcctcctcataatctttcggaagtaattgatgcttgtgaagcatatattgataatcaggaaatcacagtagaggaactgatgacttatgtcaaagctccggatttccctacaggtggttatatatatggtatcagcggagtacgtgaaggatatctgacaggtcgtggacgtgtagtaatgcgtgcaaaagcggaaattgaaaccggacagacacatgataaaatcgtagtgactgagatcccttataatgttaataaggctgaactgatcaaatatattgctgatcttgttaacgataagagaatagaaggtatctcgaatgcaaacgacgagtctgaccgtgacggtatgcgtatcgttatcgatgtaaaacgtgatgctaatgcaagtgtagtgctgaataagctgtataagatgacagccttacagacttccttcggtgtgaataatgttgcattggttcacggacgtcctaagacattgaatctgagagatatgattaaatatttcgtagagcacaggcacgaagtagttatccgccgtactcagttcgatctgcgtaaagcaaaggaacgtgcacatatccttgaaggtttaatcattgcttctgataatattgatgaagttattcgtattattcgtgcagctaagactccaaatgatgctattgcaggtttgatagaacgttttaatctgacagaaatacagtcacgtgcaattgtagagatgcgtttgcgtcagttgactggtctgatgcaggatcagcttcatgctgaatacgaagaaatcatgaaacagattgcttatttggaaagcattttggctgatgatgaggtatgtcgtaaggtgatgaaagatgaattattggaagttaaagcgaaatatggtgacgaacgtcgttctgaaatcgtttattcttccgaagagtttaatccggaggacttctatgctgatgatcagatgattatcacaatatctcatatgggatatatcaaacgtacgccattaacagaattccgtgcgcagaatcgtggtggggtaggctctaagggaacagaaactcgtgatgcggactttgtagagcatatatatccggctactatgcacaataccatgatgttctttacacaaaaaggtaaatgttattggctgaaagtttatgagataccggaaggaacgaagaattccaaaggacgtgctatacaaaacctgttaaatattgactctgatgacagtgttactgcatatttgcgtgttaagagcctggatgacactgaatatatcaatagtcattacgtattattctgtacgaagaaaggtgttatcaagaagacattgcttgaacaatattcacgcccgcgtcagaatggtgtaaatgctattacaattcgtgaggatgacagtgtaattgaagttcgaatgacgaatggtaataatgaaatcattattgctaatcgtaatggtcgggctattcgtttccatgaagctgcagttcgtgtaatgggacgtacggctacaggtgtacgtggtattacattggataatgatggtcaggatgaagtaataggaatgatatgtataaaagatttggaaacagaatctgtaatggttgtttctgaacagggatatggtaaacgctctgaaattgaagattatcgtaagactaatcgcggtggtaagggtgtaaagaccatgaatattactgaaaaaacaggtaagttggtaacaattaagtcagtgactgatgagaacgacttaatgattatcaataaatccggaataactatccgtctgaaagttgctgatgtccgtattatgggacgtgctactcaaggtgttcgtctgattaatcttgaaaaacgtaacgatcagattggttctgtatgtaaagtaatgacagaaagtcttgaggatgaagttcccgcagaagaagcagaaggtactattgtcagtgatctgactactgatcaggatgttgacaatgcagatactgctacagatgttaatgaaaataacaacgaaattgaggaatagacataatattaataattaatcaaacaacaatcatgaaaagagtattattttcaatggttttattgatggccgtaagcttatcattcgctcaaatgaagaatgtaaaagaagccaaaagcattgccagtgatgtaaaaccgaattttaatcaagctgaaaagctgattaatgaagccattaagaaccctgagaccaaggatcttcctgacacatgggacgttgctggatttattcagaaacgttttattgaagaagaacgtgataagaaaggtgttctgaaacagccgtttgacacattgaaggcatacaacagcattttaaaaatgtttgagtattatactaaatgtgatgatctagctcaagtacctaatgaaaaaggtaaaattaaaaacaaatatagaaaagcaaatgcttcaactatattggttgaacgtcctaacttaattaacggtggtattcaattctttaaccttgataagaataaggaagctttgcaattctttgcaacatacgtagaatcagcttcttatcctatgttggcagagcagaatttggctaaaacagatactcttttggcacaaatagcatattacgcaacattggctgctgacagagtaggagataaagatgcaattattaaatatgctcctgctgctttggatgacaaagatggcggtaagtttgcaatgcaattgatggcagatgcatataaagctaaaggtgatactgcagcatgggttaaatcattggaagaaggtattttaaaattccctggaaatgattatttctttgcgaatttggtagattactatactagctctaaccaagcttctaaagcaatggaatttgctgatagaatgttgtctactgatgctaataacaagttgtatctttatgtgaaagcgtatctttatcataatatgaaagaatatgataaagctattgagttctacaagaaagctattgctgcagatcctgaatatgcagaggcatattctaatgtaggattagtgtatttgatgaaggctcaggattatgctgataaagctacaacagatatcaatgatccgaaatatgcagaggcacaagctacagtgaagaaattctatgaagaagctaagccattctacgaaaaagccagagctttgaaacctgatcagaaagatttgtggttacagggtctttaccgtgtttactataatctgaacatgggtcctgaatttgaagaaatcgataagatgatgaaataattatattcagtttttataaaaagactatcccaaaatttaaattaggatagtcttttttgtttttacaaataaagaagcttgaatgatgattctgatttttttttatcaaaatatataatgatgaatttctttttgtgagaaaatgaaaaagaggctataaccaattcatttggaatgcctcttttggttttagagagagaagagagagaaattagttataagtattatctatttttctattaaacataatgataattattccctgaacgtaaacagtttattttcgttctttctccatcatccgttaataacaagcaatggcgtatcggaatggaaaatcatcttacgagcgatacttgggttaaataatcgtgcaaatatatttctcttataggaagttaatgttattatatcaatttgattatctttgatatattgatcaagtccttttaatagattatcattcattaccacatcataatgaatttcaagcccgggatattgtttttggaaatagtctttgatacctgcaagtttaatttcattccaagtatctttggattcagccagatgtattaatgagactgaaaaatggaaagatttccaagtgttgaaaaatgcttcaaaagcaatcaagtctctctgatcaaaattggttaagaaagcaatacgttttacttcattgaattctttgaatggagtattttccggaattgctaatactgctgtgcggcttcgatcaataatttcagctgttacactgccaattaagtcaatgtctttctggctttttccacgcgttcccataatgataaccttaggacgctgctccttggcatatcttaaaatttcttcttctggaattccttctcgcaaaatgcaactatatttgatatccggaaattctccagatgcaactttttcctttatcttatcagatagtgcgttgagatctgaatggacctgttggatgattgttttaacagattcttcatctccgatctgataattgaatacatcgccatatggtaatgacgaagcgtatatcggtgtaaagtaaacatgtaatagaatcacttcagaattctcagttttagccaaattaaagccaaattcacacgctttcatcgaataactggagaagtcgacaggtattaaaattttgtttgatttattatctaccttaggtgtcttctctcccactatactttcagataaccaggtagaactttccgttatttttaatgcacgtggtagatcactttctttaattcgtagacgtactcctgaagatacaacaggttgtatttgatttacgttatgaatgtatgtttctattccttcattttcgaggacattctttagaatctgagcttttgtataagtcagaatagctaaggttactaatttatcttccataataatctgtttttgaaggtgaacaaataagaaatcccaattgtttgggcaattgggattcttgttttatattttaaatttgcataggttcggtagcttgttctttttgcatactcatgtttatttcatctaaaatttttagagcccggtcgagaacagttgtgtcatccagcattacaagcccgccatccggaccgggctcaagatgtattccgacactttttccttccttgaaattgtggcccccgaagaagttgcgcactgtatctacgtgcaaaccaagttcgtctgctattctatgcatgctaccgctaggcaatgaatctttaatcttgcgaagttcattaaatgttattgttctcatgtctcataaatttaatggttaatactatattgtatttaattttttatcacgctataaacttaagcaaaaaaaaagataaaacaaattatttgcttatcttttttcctaaattcctaaattctgtttacgaattttatatcacttcaatagcggaagccggcacccatcctactttgccgtcttccaagcgaatttctttccattctttcattgagttatctttgatactgaccttacgtccctcatgaaggatgaacaaacttgttccactttcactcggagtgctgcgaactgttacactaggattcatgacgatcgcttcgcttctatttactaaacgttctttttgctctgaagcaaaaagattagagcatattacaacaattaagaaaacgatacctgatataaatcctccttttttcagtataatctgcttggagaaaataaagaagtaaagagcgatgataaatagaataaaggagacaattccccatgtagcccatgcgtctacactcatactgtttatcaaggctttggcccatgatacaaagaaaacttccggaacaggttctactttatctattgttttagcgcgtgctacttccagattggcacggatgtcgctgtttcctggtttcataagcaaagcacgttcgtagttgagtacggcttttgctatttctccagctttgtagtaactgtttcctaaattatagtacacatctgcagattccccattttttaataaggattcatatatttggatagcagttgcataatcagcttttatatatgcggaatctccttcggcttttgttacatcttccaatttcgtatcagaaaatgtatgtgaacccgcatggatagaatcagcttcggttgtttgtatagaatcaatgctttgagtttcttgtccgaaacaagtgactgacattgataataatataaaaaacaatatttttttcatgacacaatctcttctgggttaatgttttattgaattttccattctgcttatcacttctattgaagaagaataaactttatccattgcctgattttcatcacctggagcgaaacgggcaaattcacaatcattcaatgcattcaggaattctttaattagttcttcacttactccatggtttctcagcttctcttcaatattgtctttcgacaaacgggaaaccggaatactaagtttgtcactgatatatccccacaatgctttcagtacttcatcatagaaggcatctttcttgttttcagagagcaacttaccggctagtttcatgcgtttggttgctaccttattagctttctttgttttcatcttagcaacattggcatttgcagcggcttgtttgcggtagatgataaagaagatgatgaaggctagagcaggaatgatatagaatagccaataggtcattgagccatagaagaagctacccttaggttggagagtaacttcattttgcttaatgtaacggatatcttcacccaatactttcaagtcttctttattggtgaaattggcaatcacctgatcagcatttcctgcacctttctcaacattgattacatagtcttccgttttcaacgttttgtaagattttgaacggatatcgaaatagctgaaagatacccccgggattttataattgccagcatgtcttggaatagccagatactcaataactttatttcctgttagaccttcctgagttaatctgacttggttgtccacctttggatcatatacttcaaagtcatctggaaatttaatttccggattagaaatcagtttcaggttcccagttccggagatgactaacttgatagtgatagcatcattagttttcagctccttgctattgatggaagaagaaatgttgaactctcccactccacctgaaaagtttgcaggtttactagcaggaagcggattgacattaattgctattttaggagtaacgatagatttcggtactttaactacattgcttccaccattgaaaaatgcatcaaaaggatcgtcagattgtacagctttacctaccgtcatctggaactgtgccggttctataaataacttacccggttgctggggaaataatacaaattggcgatagattgtcgtattatagttacgtcctttataatgctcctgtgtccatcttgcatttgcattcatttcaatttcttgagaatgaaatcctttaaagtcaggcagtttggcattatttaattgcaagtcatgctctctggtgtatattttataggtcaggacaaatgcttcctgctcgtatacattcgttttactggcagttgccgtgataaacaaatcctgattagatacacttgtaccagatgaagagcgtgcagatgagctaccgtcattttgtcctccattaccagcctggtcttgtggcaaaaccttcacctttacggagtttgaaaccatctggttgccatcagctacaatagaagctccggggattgtatattcaccggcagtatttgccatcaatatataagtgaatgtaatactacttgtagaggtgacattaccattcattatctgtgtactgctttgctgagaacggcttggccccatcaggacgtcgaatcctttgatagacggtgcctgaaagtctttaactttttgtgtggttactgtataagatagcctgaattgatcccctaccaccactacatcgggagcggaagcagtgaatgacaccttgtcggcaagcgcttgggtgctatatgctatcaatgccatcaatataacaatcagttttttcattgcttatgaaatttatatcatcaactttttattattaccaatctttttctagacgaccgccctgaataaccttctgttgtttcttcactttgtcctgtacgtctttctcatcttgcattacagaattaagtaactgctcagcattttcctttgacatctgattatcttgtttttcaggcttcggcggttgttgctgatccttttgatcgtctttcttctgatcgttctgtttatctttgttttggtcttgtttctgctgctgatctttattctgatcctgattttgatcttgatcctgctgattctgttggtctttcagcatcttttgagcgagtgccaggttataccgtgtttcatgatctgcaggattgttgcgcaacgacattttgtaggcatccacagcttttgcataatctttaccagcttgaaaaagcacccccatattatggtaaatgtgtgccaatttcattttatccttttctattttgctggcagaatcatattgctccatggcttcctgaaacttttgttgctgtgagagcgtatttcccaaattgtacatggatacagcagatttaggattaacttccaaagccttgcgataattaacttctgcatctacgaatacactatcattgaacagacgatttcctttgcggatatagtcacgctctgctttctgtgccgaaacgccggcagccgataacagaaaagcagcaaacaggatatatttcatttttaacatacgcatagcttacttcttattagagaacagatgaacgtttttgaataatggattcttacgatccaaaattaacatctcagctagtaacaatagtaaaatgatccatgcaatagcctgaaactgttcgttgaaatccgtatatattttcgattccacatcagacttagccatcttacttatttcctgactgatagccttttgagcagaattagaattatctacccgtacatagataccctttccgtctttggctatttcttgacacatgccctcattcagacgggttacaattacattaccttcgcggtcacggcgataatcattggtaccttctacaggaataggagcaccttcgggcatacctactcccagcacacttacctgaatccctttttcggcagcagctttagcagcttctacagcgccaccttcatgattctcaccatccgtgatgacaatgatagcacgtcccactccttcttgcggagtaaaactgcgggttgccaggttgattgcctctccgattgctgtaccctgcttggaaatcagcgatgggctgatagattccaaaaacattttggcggaaatataatcgctcgtgatcggtagctgggtaaaagcatctccggcaaatacgatcataccgactttgtcgttatctaattcatctaccaatctggatattaatctcttggctttttccaaacggctgggctgcacatcctgcgccagcatagaattagatatatccagagctataatcacttccacccctttacgtttcaccgtttcctgcttggaaccaaattgcggacgagccagcaatactgagaataagccgatagcggcaaagatgagccaaaatttcacatccggtcgatatttagatacatccggcattaattgcgctaacaattccggatctccaaaacgtcggatatttctccgtctcctgtaattggaatacaagtagaaagctgctaaaaacggtaatagcagcaataaatataaatatgcaggttcttcaaatcgaaacatcttcttcctattttacgttacaaatcacgattgacgaaacattcctacggaattttcttgagtattgaattacgcaataaaacttccagtagtacacaaaggaaagcagccagtgcaaaccagcgatagtcttcttcccgtttgctatactcttttacgttcaactttgttttctccagcttgtcaatttcttcatatacctctttcagtttcgagttgctcgtagctctgaaatagttaccatcggtagtaccggcaatctgagtcagtgttttctcatcgatttccaccggcatattgatatactgtactgtattaccgaccggataaggatatggagccattccattcgtacccactccgatggtatacacacggataccgaaacttttggcaatctcagcggctgtcaatggcgaaatatctcctttattattggtaccatccgtcaataagatgataacttttgatttcgctttactgtctttcaggcgggttacagcatttgcaactcccataccaacagctgtaccatcttcaataaggccacatttgatattatgaatcatatccagcaatacagcatggtccacagtcagcgggcattgagtgaatgtttctccggcaaacagagtgataccaatattatcattcgggcgtccgttaataaattcggctgctacatctttagcagcttccagtctgtttggcttcaagtcttccgccagcatactggtagacacgtcgatagccagcataatatcaattccctctatttcgctgttttgccacttattagtgctttgcggacgcgctaataccacaataatcaaagccaatgcaatgacgcgcagtataaatggagcatgtagcaaataattcttataacttttaggagtatgcgcatatacccgtgcatccgaaatctgaagggtagcttcagttttctttcgcttcaagatataccatacaatataaggtataagcaataatagcaaaaacagatattcaatattggcaaaaaccattttattttcgatttaacagtttactatttagtattcacaccacattatgcaaagagatcataaagctgcatacctatatatacaaaagtacctattaatgctgctgacaagaatacaataccgcagattaataatattttagtacgcagagaacgtttctcgataattgtgatttccgttggttgcggtttctgattctcctcttccggttgctttgtttcgttgataaagtcgattgcattaatcaaattcgcatcattttcattcatttgcggatcatgcttggcaaattttactaaatcagctgtctggaagagttccttcaaatctgatattgcctctttatcattcatttccaataacttatcgatgatttcagaagaagtcatctctagtgcattgaatccgaaacgatctttaatataagtacgaagagtatctgtcaattccgtataatatgccttcggctgtcctttctgccatactttctcattcttgatacgttcgatttccttcatagcagcctgatgtggtggcaacttaggttctacttttatcttacggataatcggtttgttatcacgtatacgaatgatcagatagatcaataagccgagtaaaggcaatgcaagaaatgagcaaccgatcagcccataccagtcttcccatgcgaaaggcgctttcatcaccgttttctgtccgaagaactggtctggatgcaatgtgtcaactggcatagaatatactttcaatgccagagctttcgatctatattctttgccatccacagtgacaggcatcggcggaagataatagagagctgagtcaaacgaggtaacaatgtattcctgagtaatcagcattcgttggcgatcattcagaaattgtgtatccggtttggcggtttctataatttctacccctcgcaccagtgtatcggtataagcaggaaaaacagcacgttgtttggcgtccatcgctacttgtaattgtactttcgcctgttcgccaattaatatctgcaacgaatctatcttagcttccactgtaacagactgtgccacagttctacctatagaaagcagacataacaatgctatcagaataatatttctattcatctttgattccattaatttcgtttggcaaataaattcagcaatgcctttacgtaatcctggtcggttctcacagatacggagtcaacattacttttggtaaatgtgtcgttcagttcggtctgtttgtttatccaccagtcacggtgtgcccggcgtacagctttggaagaagtatcgatccattgttcatggccggtttccgcatcttttattcgcatcagtcccaccggaggaagatcactcactctcctatcgtaaacctgcaatgccactacgtcatgctttcggttggcaatagtcagagcgtttttaaagttatcctgatcgatgaagtcagatagaataaacgctgtacaacgtcttttcattacattagtcagatactccaatgcgagacgaatattggtacgacggctttccggttggaagtcaatcagttcgcggataatatatagaatgtgtttacgtccctttttaggaggaataaacttttctatccggtctgaaaagaagatcacaccaattttatcgttgttttgtatagcggaaaatgcaagagtagctgcaatttccgttaccatatccttcttcagttgtttaaccgtaccaaattccaaacttccggaaacatcgaccatcaacatcactgtcagttcgcgctcttcttcaaacaccttcacataaggtttgttgaatcgtgccgtcacattccagtcgatgtcgcgtatatcgtcgccgaactgatactcacggacttcagagaacgacatacctctacctttgaaagccgaatggtattggcctgcaaagatattgttagacagtcctcgtgtcttgatttcaatctgacgaactttttttaatatttcacttgtttccatttatacagtagttaaagtagtaagtagtcaggtagttaagtaaaatacacttgactaccttttactgcattgtaatattacggcagattagggcacttcaaccttgttcagaatcttgctgatgatttcgtccgaagtcatgttgttggcttccgcctcgtatgtcagtccaatacggtgacgaagaacatcatgcgcaacagcacgtacatcttccgggattacatagccgcggcgtttgatgaaagcgtatgtgcgggcagctagtgccagattgatagaagcacgcggtgagccaccaaatccgatcatgtctttcagttctttgagatcgtatttctcggggaaacgagtagcaaatacaatatctacaatataacgttctattttctcatccagataaacctggcgaaccaccttgcgggcttcgataatttcttctgctttcaggataggtttcacattgaacttctcaccgttgatattctgacggataatcagtttttcttcttccagcttcggatagtcaatcactactttcagcatgaaacggtctacctgtgcttcaggaagcgggtaagtaccttcttgttcaatcgggttctgagtggccaatactaagaaaggttccggcaacatgaatgtttccttaccaatagtaacctgacgttcttgcatggcttccagcaaggcactctgtactttggccggagcacggtttatttcatccgctaatacgaagttggcaaagataggtcctctttgtactttgaaagattcatctttctgactgtaaaccattgtaccaataacatcggccggcaataagtcgggagtgaactgaatacggctatatttcgcgtcgatcagggaagcgagtgttttgatagccaaagtttttgccagaccgggtacaccttctaaaagaacatgtccgtcggaaagcaatccgataagcagtgattcaaccaaatgtttctgaccaacaatgatttggtccatacctgtcgtaagattggtaacgaaagcactttgtctttcaatccgctcattcagttcgcggatatcaattgattcagccataaatacttaatattttattatttaattctcattaattaaggtgtaagacttaccagtgtgtaaggcttctaaattcgctcccaaaagtacgccatataattaacgattgcaactaatttttattaaaaaacaatgcgaaatctttagattaaggtactttcatacgcttttgtacttacgtaacatttcacccggctatacattgctgtatgagccgggtgaataggtgttttttgtttttattcttttgtaagttccggtatctcgattgtcgtaccgtatggtacgttatcggggttcttgattactttcgggttatgttttacgatatatggccacatggcttttgtaccgtaaaagcgtaatgaaactttcgttaaagtctctccttctttaattgtgtattttgttttggtaccggttatcttgtaggatgcggaatccgaatatgccgaagctgttggttgttgttgggcaggtttactttctgctttgacaggttccgctgtcggttccttcttgacaacaggttgcggttggactgcttccaccacagtatccttgtgtgcaattgtatctgaaagctgtgcttccggctgcacaggttgagtaacttccggtatatcaaccacattcttatcagacgaagatgagaacaaatccggataataaataaacaggatagctcctccgcacagtagtaagactataataatagttgctattaaataaggaatagctgatttttcctttttatcactgtctttatcagtataggtggctttcggttgttctatttccggctgttcttggagagtgacaggctccatatttgctttatgaagctcttgggctataatttgctctgcagtaacttccgctttttctgtaataaccgttttctcttcctcctcttctgttgtttcagtctctggtttctgctcttctataattgtttcttccgattgttccttagcaggttcctctgtcaccggactgaagtcaggttccaaaacagtttccgaagattcctctacaggctcttctcctggggcttcctcagatacagattccggtttcggttcaattttcacttccggcaattcttcagcttctggttcttctgttgcaattagttccggttctgtttcaggttgaccggtttcattcgcgtcagtttcaggaacttcagccacagctactgcttcagcagtcggctgctcttcgattacaggttcttccagttgtatttcttcctgaatatctccaccggcattttcatttcctgctatttcagagtcgatcatttcagtctctgtatcagaaaccgcaccttcctcctcatcggattcttccataggggtatcttccaataccgtaccttcatttaatactaccgtttcaaaatgtgcaaaaggcttatttattgtatctctcagattggtgtccggagtaaacgatactttggtatgaccttttatctggaaacgttcccctgtgttgacattaacgctttcccgactatctacatccacaagtttgaaagtccccaatcctttgattttcacagtcttctcattctccagggcttgttctatcaagagaaaaaactctttgacgaatgcttcggcatccttcttggtcatgctatgtttagccgccaataagtcgataaggtcttgaattgtcagtctttcattcataatgggaaatatatattatttaaacttgtctttcagtgtattgctgggtctgtacgtcaataccaatttaggaggaaccagcatacgttgcttcgtggacggattgatcgaaatgcgctccgcttttttcttcacttcaaaagaaccaaagccctgtattgcaatcgcattcccgtcttccagttcctgtgtcatgtcagacaataaagaacttatcagttcagaagtgtctttgatagtataccccagtctgtctgccagttccgatgtaaattccttattattcatacttgtttaatatctttgcatataaatcaaaatcgtccgcatcggttacttctacctgatagaattgtccgacttcaagttcttctctggaaacactgatcaatacttctgggtctacctccggtgaatcaaattccgtacgtccgatataataatctccctcgatccggtcgatgatgactttcatctgctgaccaatttttgcagcgctcaattctgctgaaataccttgctggatatccattagctcgtccagtcgggcttgtttaacctcctgtggtatagagtcttcatattgctgggcagcataagtaccctcttcttcagaataagcgaaagcccccatcctgtcgaaacgcgccttgcgtacaaattctttcagctcttcaaagtcttcttccgtttctccgggatgtcctaccatcagcgtagtgcgcagatggatacccggtacttctttacggaactgttcgatcagcttgtacgtatcttctttgcttacttgccgacgcatcagtttcaacatgttgtcactgatatgctgcaaggctatatccatatatttgcagacattatcgcgttcccgcatcacccgaaataaatccgttggaaaatgtgccggatacgcataatgcagacgaatccactctacacccggaatttccgagatacgttcgatcaattcgggcagcatttgctttttatacagatcgactccgtaatacgtcaattcctgagcgatcacctgaaactcctttaccccttgcgataccagataccggacttcatccagtatttcttccatcgacttggatatatggcgtcctgtaataatgggaatagcacaataagagcacttgcggtcacatccttctgaaatcttcagataagcataatgcttgggagtggtcaaagtacgctcaatatacaattcctcatggtacgtttttcccaagtcctgcaagagttctttccagttgaatttgccgtagaacttgtctacctgtggtatttcaatggccagttcttgtaaataacgctcggaaagacagcccattacaaacagtttcttcaagtcgccttcttcttttctttctgcaaattccagaatcatattgatagactcttctttcgcgtcaccgatgaaaccgcaggtgttgattaccgctatctccccttccggattttctgtatcatgagttacgctgtatcctgcttcttccagctgacgcatcaactgctccgagtctactaaatttttagaacaacctaaagtaataatatctattctctttcttttcatgcattctctccaaacagggaatcaacaaattcatttttgcggaagacttgcaaatcttccatgccttcacccaatccaatgtattttacaggaatcttgaactggtcggagatgccgatcactactccgcctttggcggttccgtccaacttggtgatagccattgcagtcacctccgtagccaatgtaaattgcttggcttgctcgaaagcattctgtccggtagaaccatccaataccagcaggacttcatccggtgcattgggtactaccttcttcatgacgttctttatcttggtaagctcattcatcaagcctactttattgtgtaagcggccggccgtatcgataatcactacatccgcattgttggcaacagcagaactcagtgtatcgaaagcgacagatgcagggtccgcacccattttctgttttacaacaggcacacctacgcgttcaccccagatcatcaactgctctacggcagctgcacggaatgtatcggcggcacccagataaacagatttgcccgctttcttgaattgataagctaatttcccgattgttgttgttttacctaccccgtttactcccactaccatcattacataaggctttttctcgataggtacatcaaagtctgctacgtcatccgaattattctcggtcaaaagggctgcaatttcatcacgcagtatgtgattcaactcctgagtattcacatatttgtctgcagctgcacgtttttcgatgcgtttgataatattcaaagttgtctctacccccacgtcagatgtgatcaaaacttcttccagattatccaatacttcgtcgtctactttcgacttaccagccacggcacgagcgattttactgaatacgctctctttggttttagataatcctttatctaaagtttccttcttttcctttgaaaaaaaactaaaaaatcccatatcaacagttatttgtataatacattatgctacaaagatataacaaaggattggaaaagtaaaaaaaagaagcaataaaaaatcccctcactgtttgccaatgaggggattttgtgtttatagcgttttatgctattctgattattttttgaaaaagtcttgtactttttcgtttgcaaccatttgttcatcaaaaacgtaagctccagttttcggagatttcaccattttgataaccttggtataagcacgaccttctttagaaccttcgtgcaaacttgctactgttttctttgccatgggttatactattattatttaatttccttatgtactgttactctcttcagaatcgggttgtatttcttcaactcaagtctttcagttgtattctttctgttcttagttgtgatatagcgagatgttcccggcattccactctctttgtgttctgtacattccagaatcacctgtactctgttaccttttgctttctttgccattgtaagttttctcctctacgtttagccgattactttaatgcttttccaatcacagaaacctttagctactgcatcgttcagtgcagcgtccagtccttttttgttgatgatacgcagaccgttagcacaaaggctaaggctgatccaacagtcttgttctacataatagaactttttgttaaacaagttcaaatcaaaggttctttttgttcttctctttgagtgtgaaacattgttgccaatcatggctttctttccggtaatttgacaaatcttcgacatttctatcttatttttatagttttatatctatacttatttcaaacaggacgcaaagtaagcacttttatccgtaaaaaacaagaatatcttaaaataattcacttccaggcaccaatttttccttatttgagcaaatcacgaagaattaatagcgcattattgcccgctctttcaatattcatggctcttccgcggttcgttttctgcctgtaagtgcgaatttcatttttataaccagcagcgatccagacagtgcctaccggcttctccggtgttccgcccccgggaccggcaattcccgaagttgcgacagcgcagtcggttttcagcgctttcatcgctccttttaccatttcgatcacagtctgctcactgacagcgccatacgcttccagtgtttccggcgaaacatggagcagattcattttcacttcgttagaatatgccactattcctccgttaaagtattccgaacttccggcaatggacgtcagacgtgccgcaatgcttcctccggtgcaactttctgcggtggaaacggttaaattcttctttttcagcagttcgcctacgattacctccagtgggatatcttcttcgctgaaaatatcatcgcccagtatcgcttccagcttagcctgctcgccgtttagtgcgctttctactgctatcttgttctgtccccgtccggttagccgcaggcggatgattccaagtttgggcagatatgccaatttgatgctttccggcaaggctgtctcccacggttccagtttttcagcaagtatggattcggggtaatgttgtaccagaaaggtccggtgcatgattacatccgtctgaaacttttcacgtagcttgggcagtacggactcagccatgacggcagtcatttcctgtggaacgcccggcatggatacgagcactttattgtctttctcaaaccagctgacagaggcgctccctaccggattgttgatgactgtgcaatctttgggaaccattgcctgactcttattcagcgcattcatcggtattttcccggcaagcacccgcttcacgttctcaaatacttcttcgctgaatatcagttcggtgtggaagtatttacagagagtttgtttggtgatatcgtcttttgtggggccgagtcctccggttaccaaaacaatattcacccttttcatcgcgttatctactgcttccatgatttcttcttcccgatcacggatcgaaacaatgcgtagaacttcgatacctatcttatttaattcctgccccatccaggcagaatttgtatcgactacctgccctatcagcagttcgtcgccaatggtaataatctcagcaaacatttttttcctgcgttagttaatagaatatgctacctatattaataaggtatatacactatgttaagtcattaggtttacttcattttttcgttccacatacatgatccattcagttcatgtgcgtgagccgaatggatcatgtatgtgaaccagacggttcacgcacgtggaacgaaggagtgctataaacaaagattcttaatgaaggcttcttatatcattaatcctcctttgtctccctattatatataggtgcattttgtttttcagcaaggcttctttatgtcgccgcctattggggcggtgacattttttcggcatttgccgtcactattgttgttgtcgtcactttaaatgtcactgtttaatttgctatacttcaattagttattaaataaaatgacgatgacggtaaaaaactgttttataatgtaacacgggaataagccggaagatcgatggagcagaagtctttatccagatacttgaagtatccggtaatggcaatcatggctgcattgtcggtcgtgtagctgaattttggaataaagatattccagccatacttttcggcatgttcccggaaagagttacgcaatccgttgttggcagagactcctccggcaacggctacttctttaatcttgtattctttggcagctttccgcagtttgtccatcaggatgtctacaacagttgcttccagagaggcggccaaatccactttatgatgctcgatgaagtcgggatcgtctttcatccagtcacgcaaggagtacaggaaagaagttttcagtccgctgaagctgtagtccagccccggaatatgcggtttgctgaaagtaaacgctttcggattgccctgacgtgccagcttgtcgatgatcggtccgcccggatatccgagccccatcacttttgaacatttatcgattgcttctccggcagcatcatcaattgtctgaccgagaatttccatctcattataggcttttaccaatataatctgtgagtttcctccggacactaataggcaaaggaacgggaatttcggttggatattctcttctccttctgctttaataaaatgagctaaaacatgtcctgtcagatgattaacatctatcaaaggaatgccgagtgaacgtgcgaatcctttagcgaaagagacgcctacaagcaaagaccccatcagtcccggtccacgtgtgaaagctaccgcgctcagttcttctttggtaactcctgcccgtttcagtgcttcgtgtaccaccggaacaatgttttgttgatgtgcccgtgaagctaattcgggtactactccgccgtatgcttcgtgtacggcttgacttgataccacatttgacagcagataaccatccttgattacggctgccgacgtatcatcacaggaggattcaattcctaatattattgcactcatatgtttttaaactattaaacggtgcaaaagtaatgataaaactacgattcataacgaactattttatatttttgttcgctaaataaaagttatcgcttatcagaacgctgaaaaagactgtacgctgggtagttggtattgtactgggagtatatatcggaactattgttttgctgaatattccaaatgttcagcgggcaatgagtatgtttatcgccaaggaattgtccgaggtgctgaatacacgcctgactatcggcaaaatcaatatcggtctattaaaccgtattatcattgatgatgtgctgcttgacgaccaaagcggcaaggaaatgctcaaagtaacccgcttatcggctaagtttgatatccttcctttctttaagggaaagatatccattagcagtgtccagttattcggctttaccatcaatctgaataaagagactcccgactctcctccgaatttcaagttcgtattggatgctttcgcttccaaggacactataaaaaaggaaagttcgctggatttgcgtatcaattccgttttgattcgtcggggaaggatggcttatcatgtattgtcagaggaaaagactcccggaaagtttaatgccaagcatgttcagcttcagaatattatagccaatatttcattgaaggcgatgaacagggattctttgaatcttggtatcaagcgtctgagcttcgatgaaaaggcttccggattctctttaaagaagatgagtctgaaattggttgccaatgataaacggactaatatagagaatttcgccatcgagctgcccgaaacttcactgaagatggataccattcatttggtgtatgacagtctgaaggcttttgatcagttctcggagaaggtccacttttctttccgtacgttgccctcgcagattactctgaaagatatttccccttttgtacctgtattggcgcatttcaaagaaccgataacgctggatatgcaggtaaaaggaacggtcgaccagctcacctgctctcatctggagattacggccgacgaccgccagttccggctttcgggggatgtatcgcttcaagagctttcgagtccgcaggatgcgtatgtatacgggaaactttccgagctttccgccaacagtcgtggcgtcggttttctggtacgtaatctgagcagcaattataatggggtacctcctcttctggaacgtttgggggatattgatttccgtggagagatttccggatacttcaccgatctggttacttatggacagttgcgtaccgggcttggtaatgtaaaaaccgacttaaagttaagttccgataaggctaaggggctgtttgcttattcaggtgctgtcaaaacagaagagtttgaactgggcaagttattgaataatgagaagttgggagaaatcacctttaacctggatgtacatggacggcatatcgaaaaacagcttcctgctgtggagttgaagggattgatcgcttctgtggaatatagcagatataaatatgagaatattacgctggacggcgaatacaagcaaggtggatttaacggaaagatagcgctggatgatccgaatgggtctatttatctgaacggagatgtgaatgtggcatccaaagttccaactttcaacttccttgccgttgtcgacaagttccgtcctaatgatctaaatcttacacctgactaccaggatgcggagttctctctgaaggtaaaagccaactttaccggaggttccattgacgagatgattggagagatcaatgtggacagcctggagttcagggcaccggacaaggaatatttcatgaagaacatgaatgtacgggctacccggcaggataatgaaaatcagcttaaactgacttctgagtttctgacagcaagcatagcgggaaaattccagtaccacaccttaccggcaagtatattcaatatcatgcgtcggtatgttccgtctttgatattgcctccgaagaaaccgatagagacgaacaataattttgcgtttgatgtacatatatataatacggacattttatctacgatatttgatgttccgttgactgtatatacacattctacgttgaaagggtattttaatgatgccttgcagcggctacgtgtggaaggctacttcccccgcctgcaatataaaaacaactttatcgagtcgggtatgatcctgtgcgagaatccttcggaccatatcagtgcgaaggtgcggctgaccagtctgaaaaagaatggagccgtgaatctttctctggaagcacaggccaaagaagataaagtcagcacgactctaaattggggaaataatgccatagcgacttatagcggaaagttggcggctgttgcacaattcctgcgtacagcaggcgaaaagcctttgctgaaagcgatggtggatgtgaaacagacagacgttatcttgaatgatacactttggcagatacatccttcgcaggtagtggtagactcgggcaaggtggatgtgaataatttctatttcagtcaccatgaccgttatgtgcgtatcaacgggcggctttccgacaatccggcggataccgtaaaggtggacttgaaagacatcaatatgggatacgtatttgatattgcaaacatatccgatgacgtaaactttgaaggagatgctacgggaacagcttatgccagcggcgtgttcaagaagcctgtgatgaatacccgcctgttcgtcaagaacttctcgctcaatcaaggccgtttaggtgatttgaacgtatatggtgcctgggataatgagaaaagaggaatctatctggatgcgtctattcaggatatatcggcgtcaccatcgcgagtcaccggtatgatctacccgttgaaaccggaaagcggacttgatctgaatatcgatgcccatgaactgaatttgaaattcctcgaattttatatgaaatcgatagcacaggatataaaaggacggggaacgggaaaagtacatttttacggaaagttcaagggattgaatctggatggggctgttatgacggatgcttccatgaagttcgatatcctgaatacccactttgccgttagagatacgattcatctggctcctaccggcttacagttcaataatatgcatattgccgatatggaagggcattcgggaaccttgaacgggtatctgcgtttccagcatttcaagaatataaattaccgttttgagatacaggctaataatatgctcttgatgaatacgaaggaatcgacggatatgccattctttggaacggtatatgctacgggaaatgcgttgcttgcagggaatgcgatacagggactggacgtaaatctcgctatgacaaccaaccggaatacggtattcacctatatcaacggaaatgtggcgtcggctgccagcacccagtttataaagtttgtagataaaacgccccgtcgaaacattcaggattccattcgggtaaattcctattttgagcagatgcagcagaagcgtcaggcggacgaagaagagcatcagacagatattcgtttgaatattctggtagatgctacacccgatgccaccatgaaaattattatggaccctatagccggagactacatcagtgcgaagggaacgggaaacatacgcacggagttttataataaaggagatgtgaagatgttcggtaattaccggatcagtcagggaatatataagttcagcttgcaggaagtgattcgcaaggattttattatcaaagatggaagtacgattactttcaacggcgctcctttggatgcgaatatggatattcaggcttcatacacggtaaactccgcttcactgaacgacttgaatccggatgtttcctccattgcccagcagactaatgtacgggtaaactgtatcatgaatctgagcgggattttactgcggccgaccattaagctgggtatcgagcttccgaatgaaagagatgaaattcagacgttggtgcgcaattatatcagtacggaagagcagatgaatatgcagattctttatctgctgggtatcggtaagttctatacggaagatgctgcacggaacaatcagaactcgaacgtgatgtcatcggtactctcttctaccctgtccggtcagttgaataatgccttatctcaggtttttgagactaataactggaatatcggtaccaatctgagcacgggtgataaaggctggacggatatggaagtagaaggtatcctgtccggtcagttgctgaacaaccgcctgctggttaatggtaatttcggctatcgggacaatccaatggcgaataccaactttataggcgacttcgaagctgaatggctgatcaaccgctcgggagatattcgtctgaaggcttataatgaaacaaatgaccgttattacacaaagacaaaccttactacgcagggagtcggtatcatgtataagaaggatttcaataaatggagtgaccttttcttctggaataaatggaaactgcgcagcaagcggaaacgtgaagaagccgaaaaggtgcaacagcagcagacagacagcattgccgatgataaagctaagtcggagctaaagagaaagcgggcacaggaataaaaataaatagtgacactataccataactgatagtgtcactattttattttatttgagaatcgtcccgtctgcggttactttaatatctatatccggagaattatttccttccagttcaatctgataataggatgttcccgttgccatctcaaagtattcggcatcatccatctgataccctgcatactcaacgctgatgatattggtcactgcggcgggcagttcgtttctccgtacctcccatgaggtagaataccactctccgcctttatcaaatagtacttcttttgaaacgttgcggttcaggccactgtcgaaatggatgatatctacttccgtaaatccaaaatcccagtcgtttttgtcatcttccacgtctacttccatgattcttgctcctgcatatttcccatcaatgaaagtcttcatggcagcgggcagttgagtggtcggaaggtgctcgttttcatgagcgtctgtgtctgcaatgcttttaatcagcactccatcaacagaataatacagatcgacttcctgattctggttttccacctcaataacgtagactgtttcgatgccttgccgctcaagtttatccacattgtctcttctccatgtcttatagtcacttgcttcgaatgcactctttaccggatcgggcaatgcggtgtacgggatatccgtttcagtcatatgccagttgccatccgttgtgaaccatgcggatgcctcatatccatcatagaagtccgctacataatatcctgcctttgtttcccactttacgttcttgacgttaggatacttggtcgagaatgcttcttgcaatgcggtaggaacagcgattgattcatcgtcatcgttatcgcagctgtgcaggctccatgctgcacagaatgctatcagtagtgtataaattttgagtttcattgttgtcatagattttaagaaagttaattatcaatatcaatcagattaaacttcaggtcaaatttcagttctgtacggttggatagttttacttcgtaatcttttttatcacgttctatcttcagcacttttgcatccggataattagttgttacatatttctggatggcggcaggaataatggcaacaggtacggaggtgtgcttgcaatctacttcctcccagtttcccttcttgtcaaattccactttgttaccattcgtaaaaatcacttcatagcttttgtaaaggaagtcactttccatttttgccagtgccactttgctgtcagagaaatgctgtttgataaactgttgtgctaattgtggcatttgagtcacctggataggtttatcgtcatctgcacgtgctactgtctgtaaagtgaacaagcatactaataagaatactaactttttcataatcattgtttttttaattggttttactgttatcatttaatttataatgcaaagatgagaggagaatctgaaaagatttgggaattttgggcaaaatccgaaaaaaacaaaggaaatctttcttattgtattcttttgtttcttttaacagcaactaataaattcatcgcttatttttgcaggcacaaatttgacaatattcatattaaatcaaccataagaactttcgtatgactatgagaacaaattgttttttattattaactgttttgctgggaatactccccatgagtaacacacacgctaacgactctatacctaaaagcgtgattttgtacacaccttacactaaaatctccgtttcaccgggggcgtctattgactacagcatcgacctgattaacaacacagacaagttggtgaatgccaatctttccgtcagtggcctatcaagcagctggaaacatgaaatgaaatccggtggttggaatctcagtcagttggccgtactccctaaagaaaagaagacttttaatttaaaagtagatgttcctttaaaagtaagcagaggcagctaccattttgtagtgtctgccggagaaacgcaactccctttgaatgtcgttgtggcacaacaaggtacttatcagacggagtttaccaccgaccagcccaatatgcagggaaattccaaatcaactttcacttttaatgccacattgaagaatcagactgccgatcagcaactatatgcgttgatggctaaagcacccagaggctggaatgttattttcaaacctaattataagcaggcaacttccgcacaagtagaagccaacagtagccagaatgtaagtatagacatcactcctcctgccaatgtggaagctggcagttataaaattcccgtacgtgccgctacaggcaatacttcggccgaactggaactggaagtagttgtcaccggttcttatcagatggaactgaccaccccgagaggattattaagttctgatgtgactgccggtgataccaaacaaatcgaactggaaattaaaaatacaggttcttctttattgaaagatatccaactgtctgccaacaagccggttgactgggatgtagctttcgaaccgtcaaagatagaaatgctgaaagccggagaaacggctactgttgtagccatcttgaaagcatctaagaaagcgcttccgggtgattatgtaactacgatgatggccaaaactccggaagtgaatgcagatgcacaattcagaattgccgtaaagactccgatgatttggggatgggtaggtgttctgattattctggctactatcggtgttgtctactatctgttccgtaaatatggaaggaggtaaattatgggcgaacaagtgatcgtacttaccgaattaaccaaacaatacggtaaatttactgctgtagatcatattcgcctgagtatccggaaaggagaaatcttcggtttgctgggtccgaacggtgccggaaagtcaactactattttgatgatgctgggattaacggagcccacatcgggaattgtcgagatttgtggaattaattctaccactcatcctattgaagtgaaaaggaaaatcggctatctgcccgaagatgtgggattctatgatgacatgacaggtctggaaaatctgatgtatacggcacggctgaacggtatccctgacaaggaggcgaaagtaaaagcactggagctgatgaagcgcgtagggcttgaagatcagctgaaaaagaaaaccggaaagtattcccgcggtatgagacaacgtcttggtctggccgatgtgcttattaagaatcccgaaatcattattctagatgagccgacttcgggaattgaccctgcgggtgttcaggagtttattgaactgattcgctggctgagcaaagaggaagggctgacggttttgttttcttcccaccatctggaccaggcacagaaagtatgtgacagagtaggattgttcagtaacggcaaaatacttgctctgattgatatggcagagctgaaagaaaagaaacaggaattgtctgatatttataaccattattttgaggaaggaggcgaagggcatgagtaaagtcaatcatcctttttgggttatcgtacataaggaaatatccgatcatgtcaaaagctggcgttttcttattctgatcggtatcatagcacttacttgtatgggatcgttatacacggcgcttactaatatcggtgcggctatcaaaccggatgatccggacagttcgttcctcttcttgaagttatttacagcttcggacgggactctcccctcttttgtgctgtttattaactttttaggtcctttgttgggaattgctttgggattcgatgctgtcaattcggagcagaataaggggacattgagccgtatgctgtctcagcccattcatcgtgattgtatcattaatgcgaagtttgtggctgctttgatcgtgataggtattatgctgtttgtactaggctttttggtgatgggattcggattgattgctattggcattcctcctacggctgaagaattctggagaatcgttttctttcttataacgagtatcttttatgtagccttttggttgaacctggccattttattctcactccgtttccgtcaggctgctacttctgcgctggcttccgtagctgtttggctgtttttcagcgtattctatacgatgattgtcaatttggtggcaaaaggattaagtccgtcgcagatggcgtctccttatcagattatcagttatcagaaatttattcttggattaatgcgtctggcacccagtgaattgtttaatgaagctactacaacgctgctgatgccttctgtcagaagtatcggaccgcttacgatggaacaggtacaaggggctattccgagtccgctgccgttgggacagagtctgcttgttgtttggccacagctcacagggctgattgcagcgactgttatctgttttgcaatctcatatattatgtttatgagaagggaaatccgatcccgataatcatatatgcggagtccaaatcaggtattgtcataaggtgtaatcttaggtagtaccatattaattctgccatccagcacattgtcttgctctggatggcagatgttttattaattgttttacttctagttcttgttggagatttcgaaacaatgttctccttgttcgaagtaatatcgcaagttcaactgttgcagacggcagatggaatcggttattgccagtcctaatccagtagatccttcttttttgtgtccttgatagaaacgttcaaagatgtgagtctcatccagtggttgcttctctccggaatttcggaaggtgatgctatgtttggttatgataatccggatatgtccttcgtctacgttatgtacaaacgcgttctttaacaggtttgttagtaaagcaatagccagagattcgttcatggttatatggaaattagcctgttctgttatacttacttctatgttcttgtagctgtagacttctttatagtcttccagatattgcctgaggagtacgtttaagtctacctctttggtgtcagtgaactgaccgttatctatttttgatagtagcaatagggatttgtttagtttggtgatatattctagtgtctgatgggttttcatcaactcttcaagctgtttctcggacaaagaatcgtcttccatcagcatttccaaccgattgcggcagatggcaagcggtgtctgaatttcatgtgaggcgtttccaatgaactgcttctgctgttcgaacatttgttctgtccgctctacgtaacgggtggccgcatcattcagtttgcggaattccgtgatccgtgtatcgtttttcagaggtttgtttttctttccggtctgatagctgtccaaccaatgaagtagtatatacagcggtcgcatattacgataaaatacccatacggatatgatgatgatacaaagtaacagagctacatacaggaaaataatccagacttgaatcgcacttttcaaatcatctttttcgatgctgggagtggatacggtcaattcgtaataacggtcttcgtcatctttaaagatagtggtcagaatacgtgccggttctgtttcctctttttctacaatgtataccatggagtctttatattggatatcttcccggctctttgcatattctttggttatttctttcagataatattgattattggaaccattatttttggagggaagctcctctcctgccaatgcgcggataatgattgtttccgaatagtcttccagtgaatcatccacttcatcgttgacttcgtcaatcatcgtaacatagaaaaagactgcccagacagtcaggataagggtcagggcgagggtgatgcgaaaaatgatataatatataagtttcatggatgatcctttctggtttcgattattctacaatcagtttatagccgaatccataaacggccttgatttcaatatttgcttctgcatccttcaattttttgcgaagatttttgatttgtgcataaatgaagtcaaagttatccacttgatcgatgtggtctccccataccgattctgccagtgtgtttttattgaccagacggccgggacgatttatgaaataaagcaggatatcatattcttttctgttcagttccagctcctgttcgttgacaaacacccggtatttgtcgggttctatccttacatttccctgacggatatagatttctccatcatgttgattccgacggatcacacttttgatccgtgcatttaattctgccagatgaaatggtttcggcaaataatcgtcagctcctaattccagtcccagtactttgtcttccagcgaatctttggcagagataataatcacattttcccgtttgtggagagctttcaaacgttcgagaaggtcaagaccgctcccgtccggcagcataatatccagtaagacacaatcatagtcgtaatcttctattttgtataatgcactgttgaagtctccagccgtttctacgacataacgttctttttccaacgaacgttggatcaattctcttaaagagggttcatcttctacaattaatatcttcataaaatcttctcctttctttattactgtctacaaagaaaagggatatttctgaaataaaactgaaatggataaaaaaagagtcagattctcaattttgaaaatctgactcttttactattgaaatagatatgtgtttttaataagaacgtgcaaaaacgacacggcaagcagaaggtttgcccgttaccatacattttcccggttctttatcaccttcaacgtacgaatcgaatgggatacaacgaatcgttgcttttgtatcctctttaatcttttcttcagtctcggttgttccgtcccaatgagccaggataaagccgccttcttcgattttctctttaaattcttcgtaagtatctactgtcgtgattttagaattgcggtaatccaatgcttttttgtagatatttgcctgaatttcttcgagcagtttttgaacgtatgtttcgatgccatcgcaagtcacagtttctttttccagtgtatcacggcgcattacttccattgtattgttttcgaggtcacgtcctcccatcaccagacgaacagggacacctttcaattcataatctgcgaatttgaagcccggacgtttgttgtccgcattgtcatatttcacagaaatgcccagtgctttcagtttggcaacaatgccttccactttcgcgtcgatttgtttcagttgctcgtcgttcttatagataggaacgattactacctgaatcggagccaaatgtggaggtaataccagaccgttatcatcggagtgagtcataatcagagcacccatcaaacgggtagaaacaccccatgaagttgcccatacatattccatcttattttccttatttacaaactgaacatcaaatgccttggcaaagttctgtccgaggaaatgagatgtaccgctttgcaatgcttttccatcctgcatcatagcttcgatggtataagtatcaagtgcaccggcaaaacgttcgttagcggattttacacctttcactaccggaacagccatgtatttctcagcaaattcgctgtatacattcagcattctgatcgcttcttcctctgcttcttcgcgtgtagcatgagcggtatgtccttcctgccacaggaattcggcagtacgcaggaaaagacgggtacgcatttcccaacggaaaacgtttgcccactgattacaaagaataggcaggtcacgataagactgaatccagtttttatatgtattccagatgattgtttctgatgtagggcgaataatcagttcctcttccaatttggcagcagggtctactactacgccagagccgtcttctgcatttttcaaacggtaatgagtcactacggcacattctttagcgaaaccttctacgtgttctgcttcgcggctcaggaatgattttggaattaataacgggaaataagcattcacgtgccctgtttccttgaacatatcgtccagttgacgttgcatcttttcccaaattgcgtatccgtaaggcttaatcaccatacatccgcgtacggcagactgttctgccaaatcagcttttaccaccaaatcgttataccactgtgagtagttttcgctacgtttggtaaggtctttcagttcttttgccattatatttttctatttaagttttcttggatgttaaaacagggtgcaaaaatacgaaaaaggaacgaactgccctattcttcttgcattattttctttataccgccttatgtgactgatttacctatttatagttactattatagtcacttttctaggactttatcgtatttatctgatacataaaatatcaagaaaatgagttaaaagaactcttgtaaaaatataaaaacagatagtcattgtctgactacctgttttataatggagcggtaagcgagactcgaactcgtgacccttagcttgggaagctaatgctctaccaactgagctactaccgcaacttgtatctttcataaaagccttatgaaatgttgatgcaaaggtaaacataatttttatatctcaaataaatttcttcaaattttagcagaggaaaatctataatataatttctattccagatgaaaaaaagaatcggatatgaaaaatcgtatattcgattgctgtacaatttaaaatatacagatagaaataaaatgattcgataaaatcctctggatttctaatcagatattttcaaaacttaatattattggatttaattcttatcaatatgcgtgattttatctgcctatactaacaataagttaatagaatggctactaactgattcaatctgaaagattaaaatgattgagatattagtcgtatccaaaacaaatgacctgttttacttgtgttttattcgttccttttaaaggagcagaacgttcctcaccgactaacgtcccgttggtttaaaaccaagtaatcgttcctttaaaaaggaaatagctcaaataacgttctttttctgtataatccgataatatatatgcaaaaacatattgaaattctgtatattattacgcgtttttatgcataatttctgctgtttgatgaaatatgtatggggctattctttgtgtaatcttaaatatagaacatttttttaagattctttctctgtttgccaaagtgaacaaacccgtcctctcatctgttagaaagtctcaattttagatttaacctaaccagcatgaaaaaaaataagatactttttgtactatgggctttgtgttttttcgtcattcagacaaatgcacagacgccgctaagtttcgaagaatcgttgcacctgcttaatcagggaaatcagagcttgaagatagctgataaggggatagagattgccaaggcagaacgtgataagctcaatgctttttggtatcctaccttgcagtctacaggtgcatttgtgcatatgtccgagaagatagaagtgaagcagccattgtctcagtttactgatccggcaaaagactttgtacattcaattattccggatgaccagataatctcagctgttctggataaaataggagccaatactcttgtctttccactaactccgagaaacttgacgactgttgatctgtcggcagaatgggtgctcttttccggaggaaaaagatttcgtgcaacaaatattggtcggacaatggtggatctggcgcgagagaatcgtgcacagactgctgcaagccagcaaaacctgttggcagaaagttattatggtctgcggttggcacaacaggtcatagcggtacgtgaagaaacatataaaggtttgcagaagcattatgaaaatgctttgaaactggaagctgccggaatgatagacaaagcaggacgactgtttgcccaagtgaatatggatgaagcaaaacgggcattggaagctgcacgaaaggaagaaacagtggtgcagagtgccttgaaagttttgttgaataaaaaagatacggatgagaatatcgttcctacttctccccttttcatgaatgattcgttaccacccaaaatgctttttgatatgtcggtcaacagcggaaactatatgcttaatcaactgcagctgcaagaacatatcgctaaacaggaagtacggattgcccaaagcggatacttgccgaatatagccctttttggaaaacagaccctctattcgcatggcattcaaagcaatttactgccgcgtaccatggtgggaattggctttacatggaatctctttgacggattggatcgggaaaagaagatccggcaatcaaaactaacccagcaaacgctggctttagggaaaatgaaagcacgcgatgatcttgctgttggagtggataaactctatacacaattggagaaagctcaggataacgtaaaagcactgaatgcgaccatcgaactaagtgaagaactggtacgtatccgaaagaaatcctttactgaagggatggcaacttctaccgaagtgattgatgctgaaaccatgcttgccaacgtaaaagtggctcgtctggcagcatattatgaatatgatgtggcattgatgaatcttctttcactctgcggcacaccggaacaatttgtaaactatcaacctaaaccgtaacaaacaatgaaaccaactagtagaaccctttcatgggcattcgtcattattatgctggcagtcggtatttttactgctctgggaataatcttgatgcacaaacaaccgctcgtcctgcaagggcaggcagaagcgacagaaatccgtattagcgggaaacttcccggacgtatcgatacctttttggttcaggaaggtgactgggtacgccaaggagatactctcgttgtaatcaacagccccgaaatacatgccaagtatcagcaggtgaatgcattggagcaagtagccgtacagcagaataagaaaatagatgccggtacccgtcgacagattgttgctaccgcgttgcaactatggaacaaaacaaaaagtgatcttacactggctaaaacaacttataaccgtattcttaccttatataaagacagtgttgtcacttcccagcggaaagatgaagtggaagctatgtataaagctgctgttgcagccgaacgggcagcctatgaacaatatcagatggcggtagacggtgcacagaaagaagataaagaatctgccgccagtatggtgaatgctgccagaagtacggtggaagaagtttcggcactattggtcgacgcccggctgacagcacctgaaaacggtcagatagctaccatctttcctaaacgtggggaattggttgcgccgggaactcctattatgaacctggttgtcatggacgatatccatgtagtactcaatgtacgtgaggatttgatgccacaatttaagatggagggcacctttgttgcggatgtgcctgctattaataaaaaaggtattgagtttaaaatctattatatcagtccgttaggaagttttgctacttggaaatcaacgaagcagaccggaagttatgacttacgaaccttcgagattcatgcccgtcccactcagaaagttgatgacctgcgccccggtatgtccatattactgacattaaatgaatgatagaatgagttcatcacaaacatattctccttttcgttccgtgctgctcagggagtggcgacggatgacttcacgacgcctttattttggtgtgtgtatcatcctgccgctatttacccttttcttcatggcaactatcttcggcaacgggcagatggaaaacattcccatcggtattgtcgatcaggacaatactgcctcttcacgagcaatcgcccgaaatatatctgctgtgccaacatttaaagtgacaaggcattttgtgaatgaggaagctgcccgaaaggccgtacagaagaaggaaatttatggctatctctccattcctccaaaatttgagcaagatgctatttcgggaaagaatgcgactctctcctattattatcattatgcgttgctttcggtaggcggcgaattgatggctgctttcgaaacgtcgctggctcctgtgtcgctctctcccattgtgatgcaagctgtcgctctcggagtggaacaagacaagatcactacattcctgttgcccgtacaagccagcaatcaccctatatacaatccaagtctggattattcggtttatctgagccaaccgtttttcttcgtcttgtttcaggtattgattttactcattactgtatatgcagtcggaattgagattaaatttcgcactgccgatgaatggctgtttgttgccaaaggaaatatggtaacggctgttttgggaaaactactcccctacactattatctttattctgataggatggctggcaaattatgtgatgtttggcattctgcatattccttttcaaggaagctggttattgatgaatatgctgacagcgctttttgtcgtggcaacgcaggccttgggattattcctgttttcgctatttccggctatctctctcatcataagtattgtttccatggtcggctctttgggagctactttatccggtgtcacttttccggtgaccaatatgtatcctttggtacgagatgcctcctatctttttcctgtccggcattttacagaaatgatgcaaaatatgctctacggagggagtggttttatctacctttggccatcggttgtgatactatgtatctttccgttgctggcttttgtgttgcttcctcatctgaaacgtgccatagaaagtcataaatatgaaaaaattaaataagttacaacagttatcgttcatcatccgacgtgaatattgggctatcagtaccagctatgctgtattactggtactgatgggtggaatcttcgtgtacggattactctataattatatgtatgcccccaatattgtaacggatgtcccggttgccgtagtcgataactcacatagcgagttgagccgtaatttcatccgctggctggatgctacgcctcaagcggaaatttatgatcaggctatggattatcacgaagctaaggaatggatgaaagctggaaaagtacaaggtattttatatctccctcatgattttgaggaacgggtatttcgtggagatgaagctgtgttttctctgtatgccactaccgatgcttttctctattttgaagccttacaaggagcttcttcacgtgtgatgctggctatcaatgacaaatatcgtccggacggagcagtctttctgcctcctcagggattattggcggtagctatggcaaagcctgtaaatgtagcgggaactgcactctataactatacggaaggatatgggtcttatctgattccggccgttatggtcattattatttttcagacattactgatggtcataggtatgctgaccggagaagaacatatgacaaaaggtatccttgcctatactcctttcggaaaaagctgggcagtcgctatacgtattgtagcagggaaaacgtttgtctactgtagtttgtatgctgttttttcattctttctattagggttgcttcctcatttctttagtattcccaatattggaaacggattgtatattgtattgatgatgatcccctacttgctggcgacttcttttctggggctggcagcctcccgatatttcactgattcggaagcaccattgcttatgattgcatttttctcggtaggactgatttttctttccggtgtttcctatccgatggagctaatgccttggtattggaaagctgctcattatatttttccggcagcacctgctacacttgcctttgtgaagttgaactcaatgggggcaagtatggctgatatccaacttgaatacattactttatggattcaggtgattgtttattttgcattaagtatatgggtttataaacgaaaactcagttgacagatatacttttagttgcagattttaaacaataattactcaaaactataatatttcagccaacgaataattaactatggaaataaaatgttttttgttgaacattttacttgattatctcgtccttttttatttattttgttaactattatttggagataggctatagtactactttaaatgtaaacatctatatgaggaatattatactatttttatttttgttgccgttgatggcatatggacaaacatacaaatatattggagtagaggatggtttaagtaaccggagaatatacaatattcagaaagatcgtcagggatatatgtggtttctcaccaacgaaggtatggaccgatacaacggtcaggatataaaacactataaattaattgaagcaaacagggagctaaattcggacatagatctcggatggctgtatgcagataaaaaagggggaatatgggtgattggaagaaaaggacgtatctttcagtatgaagagaaatatgaccgttttaagatgatttacaaattgccggaagccactgatgttatcagctacggttatttggatcgtaacagtaatatttggttgtgcagcaatgattctatcttgttgtataatacggaaacagcacagactttacagtttcctaatgtattggatgagaatatcacagtagtagaacaggcggatgatactcatttctttgtggcaacagaaatgggggtccggtatactcagttaaataaaggagctttgcatattattccttttgaaacgcttgataatgtctatacgcaaataaacgggctttattatcaccgacaacttcaaaggctctttattggtactttcagtgatggtacttttgcttatgatatgtcaactcaacaaattatcaagccagatactgctttgggtgatgtaagtatcactcatatcagaccgctgaatgaaaaggaacttttagttgccacagagggaatgggagtacacaaaatagatgtaaatacctgtaaaacttctccatacattgtagcaaactatgaaagttataatgaaatgaatggaaataacattacggatatttatattgataaagaaaaacgaatctggcttgccaattatccggcagggattacggtagtcgatccccgttataagaattatcattggataaaacattctatcggtaataaacagtctattgtcaatgatcaggttcatgcggtcattgaagatagtgaaggtgacttatggtttggaacaagcaatgggatcagtttccatgattccaaaacaggtcaatggcattctttcttaagttcttttgataagcaactgaaagacaaaaatcatattttcatcactttgtgtgaagtttcgccgggcattatctgggcaggaggatatacgtcgggcatttataagattaataagaagacattggctgtagagtatttctcgcctttcctgcttagttctgtcaacatacgaccagataaatatatacgggatatgattaaagattcaaaagggtatatatggtcgggaggatattacaatctaaagtgtattgatccgagaaagaatactgtccgtctgtatcctggagtaaatactgttacagctattgaggaaaaggatatcaattctatgtgggtgggaactgccacaggactatttctgcttgatcgaaactctggtgagtatcagtatattttaatgcctgtggagtcgacttacatcaatacgctttatcaggcaaatgatggatcactgtacatcggtacaaatggttcgggagtacttatatataatcctaaaaataggagtttcgaacactattatgccgataattcggcacttgtttccaataatatctatactattcttccggaaatggatggacagataatgatgagtacggaaagcggaatcaccagcttttctacggagaaaagatcattccacaactggagtcgagagcaaggaatgatgtcggcctgtttcaacgctacttccggcgttttacgcaaaaataaaagttttgttttcggaagcgttgatggtgctgttgaatttcccgcaggcatcaagttaccggattatgaatactcaaaaatgatattcagcgattttcatatttcttatcagcctatttatccgggggataaggactctcctctggagaaagatattgataaaacagatgtattgaagctgaaatacggtcagaataccttttcattccgggtttcttctatcaattatgattttccttcccattctgtatattattggagactggaaggttcttcatataatgaatgggtgcaattgaacagtaatagtctgattcgtttcaccaatttaagccctggcaactataaactttatgtgcgtgctatatccaaagaagagcctagtattgttttcgaagaacggcaggtcgaaataataatagcgcagcctgtatggtttagcggatgggctatattcatttatatacttgtgattgcgtttctattcggtattgctttccggattatgattctgaaaaagcagaaaaagatatcagatgaaaagacacatttctttataaacactgctcatgatatccgtactcctcttactttgataaaggctcctttagaagaatttgttgaagaggaaacattgacagagatcggttcgcagcgtataaacacggcattgagaaatgtaaatgcccttttacggctgagtactaacttaattaatttcgagcgggctgatgtttattcttctgaattgcatatttccgaatatgaactgaatacgtatatgaatgaaatctataatagtttttgttcgtatgctaacatcaagcatattgactttacatacaaaagtgactttaattatctgaatgtatggttcgataaagataagatggattctatcttaaagaatctggtatccaacgcgttgaaatatacacctgaaaatggaatggtcagcatatttgtttctgagactaaagaatcctggaggctggaagtcaaagatacgggaataggcattccggcaaacgaacagaacaaattacttaagatgcactttcggggtacgaatgctattaacgcaaagataactggtagtggaatcggactaaaactagttggaaaattagtgagtcttcatagtggtaagataaatatagagagcattgaacaacaaggtaccactatcactattgttttcccgaagggtaataagcatttccgtcattcgaatctgatagatccggagaaacccggcagacaggaagtagtattggatgctccaattatatccgaagcggctgtaaagacaaacgatgagaatctgcaacgtattcttattgttgaggataatgatgaactacgcgcttatctggtcaattcattatcaccaatgtataatgtgcaggcttgcggtaatggtaaggaagcattgatcattgcaaaagaattttggccagagcttattctttccgacattatgatgccggaaatgcggggtgatgaactgtgtattgccattaaaaatgatatagaaacatctcatattccggtattgttactcactgctttaggagaagagcagaatatattggatgggcttcatattggcgctgatgaatatattgtaaaaccattcagcgtaagaattctgaaagcaagtgttgctaatttattggcaaaccgtgcactgttgcgtagcagatatgccaatctggaaatagaagataccaaagtcatgacaccattggcgaatggaatgaatagccttgattggaaatttatatcggatgtgaagaagagtattgaggataatattgataatgccgctttttccgttgaagtgctcaatgatttgcatggtatgagtcgcaccagtttttattgtaaactgaaagcactgacagatctctctccccaagagcttataaaatcagtccgtttgaaacgtgctgtacagttgctaaaagaaggcaagcataatattactgaagtttcagaactatgtggattttcagagtccaaatatttccgacaagtattcaagaaagaatataaaatgagtccaagccagtatgctaaggaatatggtacttcttccgctattattgaagatgatacctctcaggacgattcggataaataaaataagtatagataagaggtagcttttcccttgtagaagaagctacctcttatctattcaataaataggaatattatttgcgtatcaagtatttaataaacaaataacctcctaatacttgcaggcacattccgggaataccgatgcggaaatcctgaacagctttgtagaaatttcctatatacatccactctcccaatgtgccgatgatctgataaaacaagactactcctgctaatacagggatagaaatgcgtccgaagcgttgcgcagcccatccggcggcgatagctaataatacggatttcaatagaatggcaggcaatactgcgggcactggcataccaaagagcaaagaatttatgactggagacaagatagcagttagcaaaccgaccttccagccatatttgtaagcaccgatcagagtgaagaaataaataggcagccaggttaatccacctagtggaatgagatgaaagagtctgggaaaaaggatattgccaacgatgaataacgaggttgctaaataggtcttcacattactgtaattcagtgaatagagttttactgttgtttccatatctttattcttttagaaattcaaattaataccacccataaatgttgccttgggcatgggataccctatatttatttcgtaacgttgtgccaacaggttttcacctttcacaaagatgttggcaaaattacaaatacgataacttcctcgcagatcccataaaacaaaactatcctgttgcttggtgcctttattattaacgattacagaagtgtaaagtcctttaatatattgaattcctgtcgatacagtccagcgacctgcggtatagtctgctccgacatacaatttgtgttcaggagcggcgagaaccgggttttccatgtgcaaccaactatagttggcattcacattccaatgagaattaaaccgataaccgatattcgcttcaattccccagttttctatttctccggaattgacgttcagcggaggcgtcaagccattgctcataataatattgtcaccgttaatataatacaggttcagtccgtaatataaggctccttccaataaccgttgagaataggaaagttcataactgaccagtttctccgggttcagttccggattggcaggagtaaacatatacatctcccggatggtagggttacgatatcctttgctcaccatcgctttgagttctgcgcttttgggaagatgaaaagccagtcctccctgtggaatccattcattacctacatgagagtgatgatctacacgaacacccgcatccaatgacaaccagctatttatatcttggcggaaatcgacatatcccgcaaattcatccatttgcttgtctactcccggtttccgctctccggtagccaagactttgttccatgatttgcctccgaagtgctgatagtcaaatcctatcgtcagacgattgcctgtgaagaatgtagcgctctgataccaggaaatgccgaacatcttgtctttagaattaaagtgtgatgtttgcggctgttctcctattttatatccgtcattgattttatgccgtccccaattatagaaaaagctcaaagctcctgatgtcttctcataatagttttccaaggcaagcgaggtcataccacgtgtaatacgcgaatcattgtcgataagtggaacttgtaccgttcccggattggaagcattgaagtgggttacatttacatctccccagagtttccaagaagagctgaaatcatatcctaacttggcgtatcctccatattgttcaaactccatatcggggcggtgtccgtccgtacgattgtaagaaccggtaacgatactgctgaaacgtcctttctttacacggttggaaaattccgtctgcaaagtgttgtatgagccataccctacctgcatattcgttcttactccctcatcttgctgtttgcgggtgactatattgattactccgcccattgcattcgagccatagagtacagaggcagggccgcgcaagacttccactttctctgtcaacatagactgatatgcatccgcaatcggatgtcccatcaatcccatatattgcggatgtccatcgatcaaaaccaataaacctgctgtcgggctgcctccgataccacgcagactcatgccacctgccgcacctgtggatacaccatatcccatgataccacggctggtagtaaagaatccgggaacctgttccgtcaatagcggcaaaagtgaaggttcatatcttttctctatttgttgccttcctactactgaaatagtcatgggaaggtgacgaatatccgtctcgttccgtgttccggtaactacgacttcgtcaatagtatagcttcttttgacttgtgtgctgtcttttccgggttgtgccattcctgaaatggaaagcaggctgccgaacaaaaacaaacaaactgtatttgttttcatattctgtttcgcgcttttatttctcctgcaactttttaccacttcttattttttcgaggaaatcacgaatcagcggcaatatggcttctgctgattcttcttcgctacacatcgtttctaccggacaccagcctgtgtgatcacgattccatataaaaggtacttcttgtacgaaatggacttttatatccgagcttcgtaataaatccaacgctttcgaactgatgatgtctgtatgaagttcccggatacctcccaaaatcatgagggcggcagcccccttccctactactttgtcggctatcgaagctcctttcagaaaatccggttcctgtgtcagcaaatcatataaatctgctacgccacgttgggtaaaggtacgtatgttgtctccattggcaatcacacaggaatatcctcccgagtgtaataagttgattaattcttccattataaggtcccttgtttcagttgttctacaaattggtctatccggtgcagttctttgggtatatctatgttttgaggacagtgaggtacgcattgattacatccgatgcaatgactagcctgacggagtttaggtacactgcggtcatatcctacaagaaatgcccggcgggctttgacataattctcatcctgtccgtttttaggaacattgccttcattgacacaacggttataatgtaataagacagccggaatatccagaccatacggacatggcatacaatatttgcagtcattgcaagggatggtaggatacttcagcattaactgtgccgtgtcttccagaaaatccatctcttcgtcagtcagcggttccaatggagaataagtgcgcaggttatcctgcaaatgttccatatacgtcataccgcttaatacagtcaatatatcggggaatgttccggcaaagcggaaagcccatgaagctacgctgctttccggacggcgttgtttgagacgtgccaccagattgtcattcagtttagacaaacgacctcccaaaagcggttccatgataatggatggaatcccccttttatgtagctcaccatacagatattcggcatcggtattccgggtatttgtctctttcgcgtgcttccagtccacatagttaagctgtatttgtacgaaatcccactttatctcatcgtgtcgggaaagcagataatcatatacttcgatgtcgccatgataggagaatccgagattgcgaatgcgacctgcttcacgttcttttatcaaaaagtcaagcattccattatccagatatcgtcctttaagggcgtccattccccccataccgataccatgaagcagcatataatcgatatagtccacctgaaggtctgcaaaagatttatgatacattttgagggaagcttcgcgtgaccatgtatccggagagaaattggatagtttggtagcaatgaagtatttatcacgtggataacggcttagtgcaattcctgtggatttctcagaaaaaccttgtacgtaggccggagatgtatcgaaatagtttactccatgagcgatggcgtaatcgattaatccgttcactgcatcctgatcgatcacttcacccttaccgtcgggagacggtttgagaggccagcgcatacagccgtatcctaaaagcgacacgcggtcgcctgttgttggagacgtgcggtaagtcattttgtcggtaggaatttccccttctgccgatgcactgcttgatgaagaagtgccttttgacgagcatccgtatagtatcgctgtcgatgtagctgcactgatacctacgattttgataaaatctcttctgtttatgtctttcttatttttttcttccataatcttgttctgatttaaatcatacaattctgtgcatctgatgtccggtcacgtaaatggcactaaaaggacgggatggacaaagattctcgcaagcaccgcaaccaatacaccgttcgacattgattgccggaatcttcggtgagtccgctatttcgggatcggaagctaccatctgaatagcggctgccggacaatggcgggcacagttgccgcattccattccatcagtcagcggtacgcagttctccttgatccatacagcatgcccgatttggatagcggatttctctgccaggctggtcagatgaatggcatctgtagggcatacttccgcacatttggcacactccggacggcaataaccacgctcgtaggacatttccggctgcatgagagttgccagattaccggatggacgtaatacctgagtaggacaaacagagacacatagctgacaggcagtacaatgttgggcaaagttgcgtgcatttaatgatccgggaggataaatcggattctcccggttgggaatcttcttgtcttcaatggctgccaatcctccgtctacctttttctcctgtgctttcagtatggtagaagtagcgaaaatagtcgatgccgaaagaaaactacgacgggcattgtcaatctgttccgaggtcacggattttattttaaccgcttccgtattaaccccttctttcttttgaatacgtctggtatatttaatagctccttgcttacattttcccaggcaatccatacaagcgacacaacggctataatcaatttcatgggctttggcattaatacaggatgccttacaattacgtgcgcacaatccgcagctattacatttggaagtatcgatcacaggcttgaagatggagtatcgtgatatgaatcccaatacggtgccgacaggacaaatggtattgcaataagtacgtccgttacgccatgccaaaacaaaaagcacaataagggtaatcacagcaatgatcagtgttgaaagacttttcatccagacatccacttcatagaaagcatagctttctgcccgttcggcaaaatatgccaagagattatttccccattgccataccggagccagcagactggaaaccatccggccgtatgcactgtaaggtgccagtagaacgacaaaagcattcagtccggcaaccaaggcaaggatgaatacagccaatacaccatatctcagccattttaaagccggagaataacggaagcggttctttttctgtttgccggagaaccatgaaacagcatcctgaaatactcctaacgggcaaatgaccgaacaataaatacgcccgaatagtaatgtgagcacaataaggaatagcacgacacctatgttcaaggctaatactgccggcaggaactgaattttcgccagccatccgaaccatgtgtgcaatgtccctgtgaaatcaaggaacagcagggtaataagtgtgaaacacacgattgcggctgtaagtctgatagtacgcaacataaatttattagattttcaatttatagtagttatatcttaattattttcaattccatcagaatcgaatcttatgctttttaaccgatgcaaatttaagcagagtgattgatttttgcagtatataaattacagaaagttataccaatattactgattaggattttttttaattctggattgttatatcataattaccgaaagtcattgtacataagagtttctgtcattcagaacatttcccttggtaacgggaggtctgaatgacagagcataatgattactttaagacatttaggattttagtttgtctagaaataaatcttataacttatattgggaattaaccctgttccttctttttcttcaatttcaaaggtcttttcattgtattggtaaaagtgcattccggtgcgcatacctacattcagaatcttcaatgagaactcatgagatactcttttcttatttatccggaaactgacagaaacatcaccgtttatggaaggattgaatcttttgctgtatgctttcgtttcatcaaaaaagatgtcatgctctgtctgacttctttcttcgtttacgggggtgtagcgttcccctccctgaaagaataaacgtccgttgagactcagtacgttttgtttaagtttgccgaccatccattcttttccggcaagtaagttcagcagatagttcttatccagtcttgtattacgccaaacgttatctcctcccctatatttcgatttaaacaaagaacctgtaatcatatagtagaagccatttttcatatattgttccagcgtgatgtctattccataatttctgccttgaccggtgttggtcaagattctgtccaaataaaattcctcatggttaatgaccgagaaggaggagttcttttcaaccggtatacgaaataaatattggaaataaggctctatctttaaatgcaggttttgattgatattccagtcgtatgtcatcccgacatgatgtgcccgggaaaaatccagatatcgatttgactggttcttgccgttgacgaccttttctacaaaataataatccagcttttccctgcgactatgtaatccataggccaacgccaaagaatgtttcggatttattttccattttagggcaacccgcggttcgatggataagttattgttcaaagtaaaatattgggctgttactcctaagctagtgtcccagttattattcagattgataaccgaactgctataggccgaaaagactgtgctttcaccatcaccttttgaaatctgttccataggtctgtttaatccgaaataacggctgacctgataatcaagatcatagtgaaggtttgtaatcgtaacccccgttctgttagtatgtctcggactgaacttcgtattcagataagaattaaaaacgaagtcccacctgctgttccggatatctcctactctgattagtttgtcatctgcttgttgatctaccactgtatgatctttggaataagtagcagacagggaagagcggatatacgtgttttcattcatcacatacttgtgtgcaagtcctcccaccattttttctagtctgttttctcctgcttgtcggtctcccagagtttcccatttggaacgctcttctattggagctttgtttctgtcaatcaatcctaatccccaaatagaaaaggtgccggctttggaggtcggaaagtttagcttgaatgctaaatcctgatatttaagattcaggtcattgccggtagccagtgatgtagtcgaaaaacgatagttaacgagataagaacttcctcgctttttactgattggtccctctgatgacagatcgatacccattagtccgacttgaaaagcgtgttcgtacttttgattatttccattgcgcaggtgcatatcgaaaacacccgataatacattgttatattctgcgggaaaagctccgttgtaaaaatccgaatttccgatcacctgtgtactcagagctgacaggaaacctccgcccaatcccgacaaatcggcaaaatgagtcggattgggtatctcaattccttccagcctccattgcgtgaattgcggggagtttccgcgaatggctacggcattggtgccgatgtctcccgctactcctgcgaaagcggcacttaatcgtgcagggtcatcgaagccgttggcaaatctgccggcttcttccatgctgatcatacggccgcctgtgatagccataggattgatcgtccggtttttctttatttccggcttcacgaggacttctgccagatattggatattctcgtccatcggaatttctacatatacttctttggatgaagttacggatacctcactgattatgcttatgtgatatcccgtaaaagacgcttgaatattgtagcgtccaataggaacattgctgattctgaagtttcccagactatctgtggagctattcaaggaaggttcctctaagacatagacagaggcatactctattggagcattagttttggaatcgactacaattcctcttatggtttgcgttagtttttgtgtcttttcgccgattgtttctgtttttggtgtcggcagagagataataatatgatatccctttattttgtatatgtatccggtacctttcaatatttgtgttagtgccttctcaatgcttgcggactttagcgacaatgcttgcctctttttcaggttcaggtttgactgttcgtaagctatgctatagtctgtttgtagttctatttgctcaaaggcttcttttaaagagatatttttattttgaattgtaattttcttttctgcattttgggaaattgccgtcaatgacagaatagaaaaaaacaaaagaatgatcatcttatctggttttttattcgcattaattcgattcattattttatatttgtacgttgatacttcgtttttacttcgcggtttaaatgaggatagacatttcagaactgggaagagggtctcaagctgcttcccggttctttttgttcataggctattttttttatttggttattattattttgtttccactctgccgatagctaaagccgattatatctcctaatatattcagcatttcatccagattctcatctttcaggaatttgacagtgtaccgtctagaggcagaaaaatcggtagaatgatcgataacagtatcataacgtcgttccagcgttctgaatatttcttcggcagtagcattggtgaagattattttcccttttacccaactgttcgtgtcaacagtgtctactgtcgatatctcaatatctgatgtcgatttatcataggtgagttgttcgttgggcttgagagtttgaggaggacgggattgcgtactcacttccacttttccactagtcaacgttgtggtaatattcgcatcattagcatatgcctttacattgaacttcgttccaagtaccttgacggatagttgcgatgtttctactatgaaaggttttgcatcatcttttctgactgagaaataggcttcaccatcaagggttacgacacgattctctttggtaaaagttttcggataggtaattgtacttccagcgttcagccatacttcggaactatccggcagaaccaagcgcttttgttcgccataggctgtggatatttctatctgctcgttttcggaagggatataataaagcaatcctcctgccaataagcatatgggaataacgacggctacaatgcggacaaacttatgatataaaacaatattttcaagatgttctttgttgtatccggttcttaaattgacccgctctaaagcactgtatgtttttgaatcggcttccgtatccagttcgttccaatactctaatgaggctttttctttctcctccgcgttttcttccttcataatccatcgctgtaccttttcctccgtttcaacagaaaaacgtccggaaaggaactttttgatgattctggtgataatattactcttttccatttttgctgtatttactatatatacagtctgatgacaaaaagctcaatgaaaaagtggatgtttttataaaaaagataataaaaagcacgagatagctttccgtatctcctttaatgcgaggcttaactgactttcgacatttcttttagtggtgttgagctgtattgctatctcagcattgctcaacccttcctgacggcttaatgtatagatcattttccgctgttccgacatttttccgacaatgtcatctattaataagcctaactctttagcaataagatcttcttcggaggtagaactatattcgatctcctgactactatttagataagtgtcatgtacatacttatgtttcaagaaatttatggccgaattacgggcaattgtatgcagataagaactaaaagacttggatgcatcaattgaatcatgattgatccaaaggttgacaaaaaggtcttctgtcaattcttcggcatccgattccgattttatatatccgtcgatgaaagcctttgttttattgtaataggctataaaaactgtttcaaaagccttgtgatttccatcctggaaggcttcaagcgtttttatgtcaatgttattactcatgttgtccgactttcatttttattagtgaggacaaaagaagtaattatttggcttaaaaacgcattcttttgaaaatatttaagatgtatccctgctaattattcttttttgtaatataaataatgccaaccacattcagcaaataaccgagtaaacaaataatgggtgcaaaacatatacgaagtctgctgaagatatcaggattatatgcggcaggggtactcccctcgccgctcattaatacatatcctgtgataatcaatatcgaaccaatcgatagaataatataatttattttactcaatgcatttctcatacttctgatagttttattgttttcaagtttatatttccggattttagtttctaagtcccacgatttgagagaataaagcatatttctcctcaaagcgctgattacttagcctgtattcctcttcatcaatctcttttacaagttcattatactgattccattgccagaacttatacaggcaatctctctgaaccatattgatcctgttgtctcctaatgagaatgcccagttgatgtaatcttccgattcggctgtcaggttctttaacagaggcattgctttcgtcttttctcctagggcagcataggctttggctatgtcgaatgacccgctttcatagatctcggggacattgtacgccggaacagcttgttctgcataggcaagtactttccttgctcgggtattgtcgccctgcctgatcagttcctttgccagttgggcgaaaagccttcgatgataatagcaggttcgcagggtggtttcatccagatagagtccgggagtgtccagtccgccatacttatatctgttcattacattttcatacaatctctctacatctatcgcatagttattatctcctttgacatttccccattttttataatcaaaaggcgtgaaacggaaagctaatccttcctgaacgaaataatgatcaaacttcagcttgctgacctcaccgacggatattgccatgtacaatgggcgttcccaattgcagttggcaagcatttccagcatcagcatatctaccttggttagaatacgcatatctttcagagaaatatagatcttatccggtatcgcattttttagttctttacctttcagatgacggatggagtcgggaagcattatgcctgatcgaagcactgcatctttatcaatgctgatactgatcgtatcggtagggattacgtggaagtcctgtttctccgataatgcccagtacttcaagatgttttttacctcaaacggatcattgccgaaactatcacgggcttcttccggatgtttctgataaagctcttctatctgttttttcagttccggtcggatggctacgtattcgttttttccttcctgatattgatctttactccaggtaatgggtaatccgggtgcatcatacaacgggcattgctgctgataaatataccaatctgtttgcgcataactcaaattgcagatgcgggcatctctgcgtactccttccgtgtcctgattataccacaagggaaaagtatcattatctccgttactgaaaatgataggatttcctttgtcggggagtgtcatcagataattggctccaaaatcacggcaggtgaaacgattgctccggtcatgatcatcccacgtctgactagccatctgaaccggaatcagcaggcagagaaacattaacaggccgacttgaagtactgacgacttcttttttcgaagtgcgtcacacaatccggcagctcccattcctatccaaatagcaaaagcatagaatgaacctgcgtatgcataatcccgttcacggggctgaccgggagtctggttcaaatatagcacaatagccagacctgtcatgaagaaaaggaaaaacacgacgctaaactgttgcatccccttctttccccgcatccattgccagtaaatcccgattaatcccaataatagcggcaaagcgtaaaatacgttatgccctttattctgacgcagagattcgggtaaaagttcctgatcaccaagccttagattatctaacagaggaatacccgtgatccagtttccatgctccggttcgccatgtccctggatatcattttgacgcccgacaaaattccagagaaaatagcgccaatacatataattgagctgataagcgaagaagtaggtaagattctctttttgcgtgggagctccgtccgttccttccgaccagcttttgtaggaggaagccatgcgatcattccacattcgtgaaaacagcatattttgagtatagcatacttcctctttatttcgaatcactttatatttcccttcttccctattcggtctgtagacagcaccacccgttttcatttttaccttgtaataatctccttcgggcacatactccggttcggaggcatacgttttgccataaagtaaaggggcgctttcgtattgctcccggttcaaatagcttttgagtgcgaaaatattatccggagcattttcattgagcggtgtattggcattggcacgaatcaatatcactgcataggtggtataacctacggtaagcataagtatgcaccataaagctgtattgattaatcgttttttgaaacgatagataccagctatgagcaggaaaaatgtgatagccagaaagccaatcagtcctgtttggaaaggaaatcccaaggcattgacaaagagtagttcgaaccatcctccaatatccgccattccgggaatgtagacaaaaagtatcaatacaataagcagaccggataaagcaatcgccgcaattgctcctttaagcgaaatcgttcgatatttctgataatagaaaaccagtacaatcgctggaatgcaaagcagattgagcagatgtactccgatggagagtccgattatataggcaatcagaataatccatcggtcaccataaacggtgtccgactcatcctgccagcgcagaatcatccaaaaaaccaaggcagtaagaaaagaagagaaagcatatacttctccctctactgcgctgaaccagaaagtatcactaaaagtatatgccaaagctcctaccaacccggaaccgagaatgataatcacgtcggttactgacagattctctttttcttctttcagaagagatctgaccaggcgagtgatactccaaaaaagaaagaggatacatcctgcacttagcagtgcattcagaaagttgactgtacgtgagacctgggagggatcggaggcaaactgtgtaaacagattacctaccagcatataaaaaggtgcaccaggcggatgtccgacctgtaacttttcggcgcatgaaataaactcaggacaatcccaaaaactggcagtaggttcgattgtcattccgtatacgaaagctgctatcaggaagacaagccaaccactgaaatcattccatcttttaaataataagtagttcatagttctgtaacttttttgtttgcaaagttatagaacagtgatataaaacaggcatttttagccggacggatacggacatcccatttctataaggtgttgaaaaacaaagctttttgtcaggtaattccggacaaatgtggactacaatgatttgatgtagtcttccagtgattctttggaacttacaagcataagtttctccgtttttattctggatattcttcgggtaagagtttctacagtcagtttcattagatctgcaaagcaagcaggctggataccttcgcgcaggaaagcacatactctcaaatcttcttctgtaagtttaggacttatctctttcaatttggaaacaagtccatatactccttcctgtagtcttaataattcactccagtctttctctgaaaaagaaacaaccttggaaggggaaacagaccgttcttttatttgccggactttcgatactaccggagaactttcataaatatgctgttgaagcgactgatatttttcttccagatagttacattgcaacatcagtttatccgactctgcctcttttcgcaacatttcatctttaaaagtagtcagttgagaatatacaaacttattcttcttccagagcagcccgagtaacaaggacatcacaccaaagactcccaatgcagaagaaagaataatcttcgtatcgcctgtctgatcgttcagcattagctggctggcataggcttttctttccatttccaatgcttcgtcgaaatgaccatatttctgataataaaggctgcaacgtctgcacaccttggctacataatcgtacttctctgtaagagcagcaagctttattgcttccttgaagtgggtctccgcttcctttttctggtcaagatcactctctacgcatgccagataaaaataagcctttgatttctgaagttcattgccgtgttggtcaaagtatgaaactgcctgacggatttgcttatcagacgtatgggcgatatttttatcttcattcagctgggtacacaacagattatattctgccagctgtgcttcgttcatctggttgatctggatattttcgagaataatagatgctgtatccgggtcctgccccattagctgtgcggctttgtctaatccctgttttacattagtcccttccggatggcatgcagccagtgaaaggacaaccacgtataataagattcgaagattattcataactctgcttttatctttgtatacaaacgattggatttgcaaatataaaaaataatatgatacatacacctctataaaccatacaaaaaatggtgtcactatcctcctctcatagtgacactatactgtgatcatagttacaccatcacggcaggatagtgtaactatattatttatgctcctattattatgcatatcgcagattgccctcatgttttttttgacaaagatcaagcgatgacgggctgtttattaagaagattagccgtatctttgtaacaaataaaaattgtatatatcatgattaaaaacattgtatttgattttggcggagtgattgtagacattgatcgcgataaagctgttcaggcgtttatcaaactgggattggcggatgccgatactcgtttggacaaataccatcagaccggaatcttccaagaactggaagaaggaaagttgagtgccgatgaatttcggaagcaattgggagatctgtgcggtcgcgaactgacgatggaagaaaccaaacaggcgtggttaggctttttcaatgaagtggacttgcgaaagctcgattatatattgggacttcgtaaatcatatcatgtgtatctcttgagtaataccaatccttttgttatgtcatgggcatgcagtccggagttttcatccgaagggaaaccgctgaacgattattgcgacaaactatatttatcttaccagttgggacataccaaaccggctcccgaaatattcgactttatgataaaagacagtcatgtcataccttccgaaacgctcttcgttgacgatggaagttcgaatatccacataggcaaagaacttggcttcgaaaccttccaaccagaaaacggtgctgattggcggcaagagttgaccgttatactaaatagttgagaagaggtatctttatgctcctcccacctacaggaggggaccccggaaggaaaggtgccaggtaagcaatttctaaaaccttttcagctctttcttttcaaatgtccactccggtgtatacaatctgccactgtctgtatctgtcagttcataccaaggtgacagatttcggttggcaggattgacgaggatatgtatttgctgggcgggcatataactttgcgccaataaaaaaactttcttttttgttttcgggtgaattgccacatctactactatcacgacatggcccggtgaacctcctttgataaacacatctcctgcttgcagtgaagtataaggaaccgtacgaagctcttttgaaagagaagcagtgccggcatacataaataccatattcaagtatttacgaaaagtcttatatgaatagtctttgcctcctgcagcataccattctaccttatttccagttactttgatacggtttccttccgcccattttttatattctgccggaaagccattggtaaagttaaatttgatttctccgtatcttttctgtgcccataggtattctgcccgcaagcgcatgactgcatccgcacattgctgtaaatcgcgattgcctatttccatatctactacggcgaatgcggctgcctgattccttttctcctgtccgttgtaaagtaaaaccttactccctttgggcaataatgggagttgacgcagataggcggcaaatgaatgttcatcgcatacttcacgagtgtagcccgtaggaggaagaatggtgctttccactgactgtcccagcgacactataattgaagtcagacatactatgctgaatataagtattcttttcatatcgttatttttcccgaagataggatatcttttgcagaaaaccaagttttgcaggaggaagcttctgaaaccgtctaatcagaatactattcggcaaaaacagaattttcggatattctctttatctttgctgcaaataaaagaatatgcaaccacaaatcatactcattaccggagcttcttccggatttggaaagatcactgcgcaaatgttatcagaacaaggtcatatcgtttacggtacgagccggaaaccttcagagaatataggtaaggtccgaatgcttgtcgttgatgtaacgaatagtatttctgttcgtcaggctgtagaacaaataatatccgagcagggacggatggatgtactgattaataatgccggtatgggaattggcggagcattggagttggctaccgaagaagaagtgagcatgcagatgaatacaaatttctttggcgtggtcaatatgtgcaaagcggtgctcccttatatgcgcaaggcacgtcggggaaagattatcaatatcagctctattggtggagtgatgggcatcccctatcagggattttattcagcatccaagtttgcagtagaaggatacagcgaggccttggcgctggaagttcatccgtttcatattaaagtctgcctggtgcagccgggagattttaataccgggtttaccgacaaccggaatatctctgaactgaccggacaaaatgaagattatgctgacagttttctgagatcattaaagattattgaaaaagaagagcgtaacggatgccatccccgcaagctgggtgctgcaatctgtaaaatagtagcgcgtaaaaatcctcctttccggactaaagtaggtccgttggtgcaagttctgtttgctaaaagcaagagctggctgccggataatatgatgcaatatgctctccgaatattttatgctatcagataaaaaaaagtttcatgccttgaaactgttggtttcaagcaatgaaactaatcgtttcaaggcatgaaactaataacgtgtaatagtgcggcaatcagttcttcggaactaattccaaaaacatagtagtcgtcaacaatatagccagcccgatacagactgttatcaataaccagttaatatatttagctttgggcttggtatctgcgtgcagattattcaggaaatattctctgaagaagagatagagtcccggaatagtcgcacttgccaaaaggaaatcttccggtatctggaagaagtaagtcttggataatccgatcaatgaccagtggcaaaggaacaataccaaaaacatatttaccttgtgtgcaaacagcaacagcagtccgatggtaaataccactacagaacaaggcatcactggagaagtcatttccgggaaagatagcccgcgtgccaacgacaccataggataaatgaaaggcatggccagcaacacataagatagcagatcatatttgtgtgtacgttcgaaagtcgtatatccggtaatcgcatcccatatccagataatagccatcactccccagaacatcgccatcaccccgttatagctgcgttcttcgcagtagataaagtaatagacaatggaaatccacgaataaagacctatcatataaatcttcattcccatcttcacccacggacgtggtttgctgatcagcaatgcggtcagcacaataccgatcagaatgacaataatctgcaaaagccaggtggctgaattataatacgcaattgttctccaaaaaatctccataaaagtagtttaattaatgtcttgttaaagaaaaggctctgtgcgggaacaggaacatcgggaatgtagctccgactgcaagcatgaaaattactgtacttgccaccaaagtgttggagaagaacatctcctgcatctttatatacttatcatgcagttccggtttattcgctgtctgcaaacacataataagagagaataccatgttgtacgcaaactttcccggaatcatcgggagcaacgcaggaatatacagcaccgtcatcgggcaatatacccgctttccgagccataaactgccgaacccgattactaatccaccgaataaagaagccgtagcaatatctacacccaagtaagtcatcagacagaaacggcacgcatgtcccaatgccgccaatattgcaatcattttaaatgcacgcaacggaggatcggaaattgctccaaatccgatacctgctatcgctgcaaagaaaccatcagaaagaatatcaagtgctaccatatcaaattaaactgttttttaccattaataatgtaaaggaaaggccgatggcaatgctgacaatcagcaaagaggcttctgtcaaacgggcaaatcctgtcaaaacgtatccttcgacaacatcaatcactccattaatcaaaggaacaccgggtacaagatatagaacgctggttgccagtgcgatttcggaagttgtgtcgaaaatcaaggcggtagaagcacagagcgacgcgacgaaggccgaaacaatgaatataatataatgattcattttcttcttttgcatctgctgtttcaggtataatcctgtaatagtggcggagaaaacgattcccattgagattaagtcaccgccaaacagtttgcagaatgacgcattggcaaagcctaccaatatcaaaacgaacagaggatgtatcatcggagcagagactatctttttgtatttctctttcagttcttccaacgataactgtttgtctactgcttcccaactcaaagcgcttagttcggagttatgctcaaaactgatgggatgtgcaggaatatctataacctcgttgcaggcttcgtttgtctccttatcgatgatagtaagaatgatatttttatgaaatacgcccagtttgacatctaagccaaaagcttctccgatacgtttggaattgcgtacaacacgggaggtatgtacccccgctcccattagatgggctgaatattcggctatgaatttacctatagataataaagattcgcttgtcttcatgtatgtgatatttttaaatcggctgcaaaagtacaaaaaagagtaatagcaggaaaggtaaaacacaaaaaataaatacctttgcctccataaaaagaatgactcatgaacaaccaatttacatatccgaaagagaaaatacgttttgccatcctgactttcttctttgcccaaggactctgtatggcaagctgggcaagccgtatcccggatttcaaagatgtatttgctgccaattatgcattttattggggtctgattttatttatgataccagtcggcaagtttgtagcaattcctttggcgggttatcttgtatctaaattagggagtcgcacaatggtacaggtcagcattttgggatatgccatgtccttactttgtgtcggattggctcatgaagtctatttgctgggattcctgcttttttgtttcggagtgttctggaacttgtgcgatatatcgttcaatacgcaagggatcgaagtggagcgtttgtatggtaagacaatcatggcaacttttcatggaggatggagcttgggagcctgtaccggagcacttatcggcttcgtgatgattctgacgggcacctctcctgtttggcattatatgctaatagccgctattatccttatcatagtattggcaggacgaaaatatctgcaagaaacaacgcttcctatatgcgaacatccgaagccgagccttgagacaacagacaaagcggctgataaagctccgaatggattccgtctgttatttcaaaagccggaaatactccttttacaattaggtttagtcggattattcgcgctcatcgtagagagtgctatgttcgactggagtgctgtttattttgaatcggttgtccatgtgcctaaatcattgcaaatcggcttccttgtatttatggtcatgatggctacgggacgattcctgacgaattatgcataccagctttggggaaagaaaaaagtactgcaactggcaggcagccttatttgtatcggcttcttcatttccgcattgttgggcaatgcgtttgactcactgggaatgaaagtgatcatcaattccttaggctttatgctggtcggactaggtatctcatgtatcgtacctactttatatagctttgtaggggccaagtcaaagacgcccgtcagcattgcgctcactatcctgtcgagtatcagttttattggttcgctgatcgctcctttgctaataggcgctattacacaggcatttgatattcgtattgcttacatgattacaggtatattgggaggttgtatcgtacttatcgtcagtttctgcaaagcattcgatattcaggaagaaaacaaattgtagatatataaaacgcagtctctcacagtacttgatcattcaagtgtctgtgaaagactgcatcaatctttttactaaccttaactaacctaacttctatctaatctaactacaaaatgttcgaaaaatcttttatactactaacaattctatcctttaaattctgcttctcaaccagtgaaaagtcgcaggtagcatctgccggagccaataatacggccttagcttcttctgcatctgctatctgttccgggtgctctctgaaataagtttcccattgggaagctgcttccggagttacacccagtgcataattgatgaaatcatcatccgtcaaaaaatcctttaccttagagcacatatcgcatcctttttaagcgtttacatagataggacgctgttactctgtgtatgtactcaactaaatatcctttttactaaaattaacttgccagactgcgcaattttgtcaaaccacggtgcatcaggttgcgtacagactgatagttcatgttcataatctcacaaatatcctcgtatttcttttcttctatataatataatgtaagtgcttcacgctgccggggagaaagctggtccagtagacgcttcaccagtgagaactcatttttgcgttgctcttcttccatatagtcatcttctacgtctgtgggagctactgcatttacatcttctatggctgtatcagacatatacatacgtttgcggagttcatcgcagagtttgttcttcaatgagatgaacaaataagacttcaaattatcaatagttcctaattcttcctttttagtatagagcttaacgaaaatatcgtggatgcaatctttcagtaactctttatcaatggtcaacttcaatccgtaattaaaaagaatgttgatgtgcaaatcatatagctgcgaaaaagctgccatatttcccgcttgaaaagaagcgagtaaagtgtcggttgaattattagtctgttccatcatagcattaattcgattgatttgatgttgcaaagctaagcagaactgacctcaaccacaggtaaaatctggtttgtaggttgaaaaaacaagtatcatgttttataacactcttttgttagaaattacctataaaatggaaaaatcccgctgaccagtcatcagcgggattttttgtttcagagtttatggaaccaataaataccttctttcttatccggtacctttaatttatatactccattaattttcaatgatttatccataatgaccatcttccctgaaccaggatggatgtactttaagatatactttccgggcgataattgaacaggaatttctgttccggacttggaataaatgatactgccgatatcagattttaccattttcttatagttgtcggtatcggtttcttccacttccatagccgctgcatccttcaggaatgctttatctgtgcacggaattacaggacatgaaccgccggccatgaatacagcccatcccatagccggataattctgtgcgtagaaggttacggctttctccgggaacttctgacgatattcgtggacagccttgtaggcttcggtgaaagtaacctttccgactttcatcttacgcatgtgttggcggggagccatattcttccctccttccggtgcaaagactccatctgttttatagtgccagtagcggatatcaataatatccaccacagctgcacgtttcggatcggcaaggatggcgtcctgtacatcttttgtggtacttaatgctactttggccttctttccggtttcagtttcccattcggcaatcacatccagccaaaactgtacaaaatgtagtggacctgtaaattcggcacttgtcagctgaatgacattcgggttatctgcaaagttgttcagacactggcggatgtattgtctgtgtaactcacggcgaaccggatgagtgatatcataaaacatatctgcaacaaagattcgtttgtctcctgcaaacggagcaggttccggaaatccggtctggttgatattgttggtgcttctccacggacaatctacccagtgcgcacctgcttccaggatattgtgctggaaatagttctcatggaatagcaatagtccgtctttatttcctttttcggcaaactctttcaatcgcgaccaataccatgcattagggcgattcagatcatatttgctcagtccttcccaggcagtaccctgaccgctacgtccgaaaggttgttcgtagaaaggcccccatacatctccgtcacgacggcgcactcgttcatgatcatcccggcggcgatcataccaaagtccgtagttttggtcaaataccaatatgttcttttgtttcatatagccgattacggaatcgatgcgatctgtcagtcccaatccttcacgtccgggaacaaagcgggtgatggcagggcttgcttttttcagaaagttggttttaagttttccattccaccaaggggtggtatggctacttcctaccaacaaagtactgttcatctggatacgtccgtttgcaatagttacttccggttttgccgatgtcttgttcggagttatcttcttttctttaatatcatcgattgattttactccggacatagctattgaaggagcaaaggctccttgttcaatccagtgttccaatgtcaggcggggattgtaagcctctttggccagttccatagcaacttcaacggtcggactgctggtggcgcttgtatttcttggcaggatacgggcacgttctgcacatttcttctgcaaacgatcttctaattgagcatagaaaatgcttcggggctgcacatgattgtttgattgtgcccattcgccgtcaccggagaactgtgcccagcatccgtacgcacggttcatggcatcctttgccggagcataacactctatttcggcagcggtacattgccagaacagactatttgccgtattccatcccgctccgttcttgtcctgtcccagattcttgaaactcagattatgcccgtctatattaaccacgtcaaacaataggccacatgcccatgcatcaatagatccgctgaaacctaaagattcatacgaatcacattgtacgaaagcattcggtccggcagcacaatatccggctgcaaagtcatgaataccctgttccgaatagcagcgctggaaaagtgtctgttgtcctaaggtatagaaagtacagcggcgcattcctccgatttcagaaacaggttcccgtgagatacagtcctcaaccgtgatttgggaaccggtacgctgaacaaggattgcacttcctgcaaagtgtttaaagctcaccctgcgtacccagcaatcttccgcatcttcgatagaaatacctgtccagcaatgatcttcatctttagggtaccgtttgtcatagtcggaaatcagagtcatattttctactccgcactcccggatgcgcccgttccactgataagtaatcacggaagaagtaccgtatttggcatccagcgccactgtcagcggagcgtccaacgttatctgattaccgtttacttctgtcacggttctatcccaggtaagatccatatctccttctttccagcccagtgcactgattcctcctccaaagatatcacatcctaacgaagcaatccattctttgccggacggacggttcaccagtatccgatctccctttctcaacgaagtacctgaagcaacttccaatgtcctcgcatttaccggaacatatttcgagagtacctgcaatgtatcctgtttcttcagatcgtctgtcccttccatgtagataagggcacctctgtctactcctttttttagaagtatcgttttctctttatccactccgcgcagtacgatgccggaggcatttatacgaaggcttccggataaagaaaattctccctgatccaataacacggctcctctgaaaccggaagcatcaggtactaatgaggcgacatagtcaatggcgcgttgaatacgtgatgtattatctcctgctgtccaaggtacaaacacggcattgcggacagaaggaatatcctgttcggagcccttgtagccacagtacgagaaatcaagaatccggtttccctgttcgtcattcaagtaagtgatccggtcatccttaacctgtaaagcaaaggtttgcgcatatccctgcgcaaaccctatgctcaataatcctaaaaggatagttcttaattgtatattcattacaataaacgttgttttctaattattcaatcctgaaagatcatttgaccataagcaaatcatacgattaaaacagacttttccgtttggacaaggtatcgtagttgttcttcagatctgtccagtctactttcttctttgtatccaacccattgatatatttctcgatattggtatagccgtctccattacagtcctcctttgcatcagtcggatcgttcggattcagtccgttggcaatttcccatgcgtccggcataccgtcaccatccgaatcaagatatgcttctcctttgtattcaggaagtccgcccacctgacggatatcggtgatgataccttgtttgtaggagtctgccggcaagcgtcttttcacgtaaggagagataaattccggagcatctttcgcataaatcgcttttcctgtttgtacagtcttgatgacgcgagcgtctaccgcatcccgtttcgggagagtagcacctacattatccaatacaaagttataagctttttgggtatccataatcgttacaggcgacattttgaatgctttgtccactctgatttgcggtaagaactttccctcatccacttcactggcaagctgaactccgccattccagttatcttttgtcactttagcatttccgtgaacgatgttaccgtttacataagcctttccgaaggacatcggtttgcttttatcgcgtccggcttccggtttcaatatacgataggaaataggtttatccagcggggtgataggaccgggcttaaaatagttattgattatattataaaaactcttgttgtctcctccatcgatagaacggttccaccagttgaaaacaacattgtttacgaagttaaagtctccgtccatacccaccgaactgttacgactgatattggaagcgaaaagattacggcagaacatactattatgtcctccgatagtggcgccaaacgcatgattataagtatccaatgcttccgagaatatcgaattctgaatggtaatgttcacagtaggcaacttcagtccgtgcccggtttcatccctgttgtagacgtggcgatagatagacatattttcatccagtccccagcttgccgaacagtggtctattataatattgccgactgcatttcctcctactgcatcatcccggaaagcaacatcctgtgccccccgacggaaacgcatatgacgaatcactacatcatgagtatcgatcagaaaagaatgcccggtcacgcagataccgtctcccggtgctgtctgtcccgcaatcgttacataaggggcacgtacactgatcgggcttttcaggcgaataatacctgacacattaaatacaataacacgtgcgccaccggtttcacaggcttcgcggaatgtgccgggaccggaatcttccagggaagtaaccacaatcactttgcctccacgaccaccgggagtgtacataccaccgccttccgcaccggggaaggccggaatattacttttgatcaaatcctccggtttggaagcccaaggtttgtaaggtcttcctaactttgcttcttccaaaactgttggcaaggctttttcccatgccgcattggatttctgttcgaactctgcttcttgttttgctcctctttcttttaccgagtcggggatcaccggatattgggctgccacaggtagtacacaggcaaccaacatccatactgataatactttcttaatcttgttcattcttccgaatcttaataggtttttaaaaaagacgattaagaaagtattttgtaatcggtctttctatcctttccgccattcattcatatattcacggggagtctgattatatttcttgcggaaacacttgctatagtagcctgaatctttgaatccgacagcaaacgccacttccgaaacactcaaatccgtatttttaatcagttcgatcgatttattcaggcgaatctcctttaccagatcgacaggtgccagtccggtaaggcttttcagctttttgaagaatgccgaacggctcagtccgatgccggatgcgatcgtatcaatattgaaatcactgtcgtccatgttttcctcgatcacctgatgtatcttttcaagaaactgcacatctttctttaccaaatattgttcgtagctgtcttcttccgttgtcgtctggttctccatctgctggcggatacgttcgcggaacagtttccgttcgccaagcaactgatcgattcgtgccaacagatactctttgctgaatggcttggttatatatgcattcgcccccagagtgatcgctttggtcttggcaccttcgtcgttcttggctgtcagaataatgacagggatatggctgatctgaaaatccttccggatagattgcagcatttccagtccatccatttccggcatcatctgatcggtcactacgatgtccgggtgatacagatgcactttcttcagaccttctacgccgttattggctatatggatgttgaatttatcttccaattgcagttttattaactggcaaaggtctttattatcctctaccagcagaagagtcggtaatgaagcgtcaatttccagttcctcctccggttccttttcggaatcgataaccatctccttgtctgtagcggcaggagcagtttccgtatcgctgacatagaaatctacttccgacggacgataatgatccttgcccaataatagctctacaataaacacggccccctgcccttccggactttcggcacggatgataccgtgatgcagatttactatttctttggaaagtgccaacccgatgcctgtaccctgataatgtggattattcgcattctctccttgtgagaaacgctcgaaaatctcactcagcttattttgcggaatgccgacaccgttgtcttctactcgtacatagcaggattttccgtcatccgtcaatccggtagttacataaatacttccaccggaaggggtaaatttgaacgcattcgatatgacgttgcggataacaatgctcaatttgtccttatctgcccataccataatcggttcgtccggtagctggaaggtgaaactgatttcattttcctccgaaagtacacggaattctttttggaaggaggctatcatttcattgaaatcgatcaatgatacatgcaggcgcatcttgccattctgaatctttcggaaatcaagaatctgattgaccagttgtaacatttgatttgtatttttttccatcaggtccacatattgcaatcctttcggagacagctcttccctttccttcagttcttgtatcggcccttttatcagtgtcagaggagtacgaagctcatgggaaatattggtgaagaacttgattttcatttccgagactttctgttcgatataaatatcgttcttcatcttaatcatgaagaaggccaggcgcagaccgaaatagagggccgcaatgccaaggattacatagataagagtagcccaccagctcagccaccatggcgggagaatggtgacagccaatgtacgtgtggatacaagttccggattagcttcatccatcgtttctacacggaatacgtagtctccgggaggaacattggtataagaagcaatacggtttttgccgttatagtgccattccttctcatacccttcgagtatgtaacgataagatacgcgattctgattgtagaaatttaatgcggcaaattcgattgtgaacatagactgattatacttcaattgaagtgcatcggtgtatgtgatagacttttgaatcggacagtcgttcaaacttcgcagattacgattggatactttaaagtctacgatacgggtgtcatagttggtatgttgtgtctccagtttatcaggagagaatgtcagaatcccctgtcgcgaaccaagccataagtctccgttcaatgcacgcaacgcactgccttcttccagttcaacattcaggaaaccatcgtatttgtcgtagttacggaactgctctgtcgccttattaaagcaggacaggccaatctcggtagtaaaccacaaatttccgtttttatcttccacgatggacttgaccacatcgttattcattccttcacgtatgccatatgacttgaatatcggttcacgtttttctttgtcatagcggaccagtttattcagacctccaccgaatacactcacccaaatttgtgaattactgtctttatataatacataaatatcattgtccgccacattggaacgatcgctgatttgtcggtacgtctcaaactgaatctgttcgggagtcgtaaaatgtccgtcaaaagacatcagaccatccatcgttcctacccagatacgcccatcttcatcttccgtcattgtgcggacttccatatacagaccataagcgggatactgtttcagtccgttgtacttatgcttgaatacaagcgttccattttcttcggaaattaagttcagcccgccgcccaacagaccgacccagatacgctcctgactatcctgatatgtgaaatatacatcattgttactgatagtattcggattcttagaatcatttttataacgggtaaagcgcagaccgtgcggtgagttcatatccggttcggctttgacaagtccgtttcccttagtggaaaaccataagtttccttctttatcttccatgatatgatatacggcgcctatcagataattctgatccgtaaaaacctgctttatctgtccgttgctatccagacgataaagtgcctgccaacgggtacctacccagatatccccgttctttgcctgataaagcgcacgtatcccctgattccaggaggtcgctttttcagccccgacagggacaggagaaacttctgtcagcagttgaaattgcttctttggaaagttgactttgtatactccgctgcctgtagatgccagccaaagaataccgtctttatccagcagcagatgaaagaagagctgatcgggaaggtcgtcggaaaaaggtttcagttgattgatacgggtcatttccagtttctccctgtcgaagagcagaatttctccaccgggggtgaggaaaaacataccctgttcaccggcatcctgcttttcaaagttaccgatggcattttgtttggggaaaggaaagcgatgattgcttttgttcagaggatcatagtacgtcaatgcctcattaccttcctgaaaccaaattttgtcatacttgtcattgaatatcattcctacttttttccctgcgatggagaacggtagtttggtcagttgtttgtagccgatgttatattcatacgcaccatcaacggtggtgatatacattaatcctgattcagtgaccagtatattggaaatcggttgatcaatttccggtatttcgtaacggttgactactccattttgcggatcgacgctataaatatgtccgttcttatctcccagccataagaatttggaactgtaggaagcacaagtgaactggtccggattggcagaaactttcttttgaataaagtcgacaggcttatctttcagagcctctccttttcttaatgaaagaatctgatagtccataccgatccaattgataaactcggcagtttcgcaaaacacattatgcttgaggcgtaagtcgtagacgttgacattgggacgcgaatcgtgcaactgcttcatggtgattttaccgttctggtctgtatttgcacgcagcaggcttttatctttggtcagcagcagtacgtctccgtcatctgtcgtctgtatcttgataatctgaatattttcagagtactcttttacatcgtcatacactgcgtggaaactttcatgtttcttatcaaatagatagagtttgcggtcgatagtcttgatccaaaggtatccgttccggtcttctacaatacgctgaatcttacggggaggaatatctgctgagtaaaatccgtcatgattatcataggaacggaatttggtaccgtcgaaactgcatagtccgtaccaggtgccgaaccatacaaatccgtcctgccctttcagtgtacaattgacaatgttattgggtaagcctcgttcagccgtataatgttcaacgatcatgttagggtaggcaaaagcacagattctcgttatcaagagaaacataaatatcaaaaagaagtgtttcttcattgtatattatattagtggaaatgaatcttgcatcaaagatactatttttcgggtaaaattcaaattagcagataataaatccagattggtaaccttgttttgccatgcacaaatctgcggtcaagtttttcaaatttacttttctattccaaattcagtctgttgccgttccacttcatccaacacccgttgccgttcttcttccgtcagttgcactttgccttcagttgcactctcggacgaaccggcttttacagttaatgaggatgttttctgaccaatacagtacttctcgtcataacagaaaggaagtcccgcaggaacactttcaaattccatttcagttgcagtcggagcctgagttccttcaaattgcacgtgggctttcactctaatcttcccggcttttcgtgtggaacggatcagtagaggagccgatccgaattctacggcacggggattggcgccaatccttgcatcgccaatgatttctccttcaccttctaccgtgaatacgatattttcctttgccagacgacgtacatttccgctatcatccgttacttcggcaactaccactatgaaatccgaaccatccgctaccagatttactttttgagtatctgcatacaagcgaagtttggtagaccgccgggaaggcattttcttttgtgtacatacaactttcccatcgataataccttcggcaaccatatttaccttctgccagttcttttgagtataactgtatccgcgtgcttcccaaaaatcccatacattttcaaagacaacaggtgcgttcggcaggtgacctttggcatgtaccacaggtttggtccatgtttttgtcccatcatagatagaaaggcggatggagtcacagttgctgaatatcacgacatccttatcggagaactgtgacatttcatgagcaaggaatatcatcggtccgcattctgccaacggatgttggaggcttgccggagattggctgcggaacatttcatacgcatactttttctgacggaaagcgtcataaatacctccccagtatggatcggggtgataaccacgctggtgatcgaacggatgccactgtgtgccaccgataaactgaccggtagtgcggtacatctcatcataacttgtagccagagaaagtgcctgtatcagcaacggacgttcaccccaactgcggcttgcacgattattgttgttgtgggcataccagtcatctacgttttctccgaattcacgggtgaagatgcattgttccggtttgtcctccttttcgtcatcacccggccagccgtagactacatcgtaatgttcctttacaccggcagaatgcacatcggcagcggctatcggacgtcccggatatggatattcttccttcgttatttcaagtgccttcagtgcaaagtcgagtggataacgggtctcattcagaataggctcccacatcagcacggaaggatgattgcgatcacgacgaatcatttcacgggtattctgatgaaccagttctccgaatttcgggtctttgttccagtattgccagcccggagtagcgacgatgacaaacatgccgagttcgtcacaggcatccataaaggatgggtcctgtggataatgcgctacacggatgatggtacatcctgcatcacgcaggcgttttgcgtcacgccattgctgtgaattgggaagagcattgcctacgtatgcgaaatcctgatgacgattggctccaactaattgtccgaaaggttttccattcagccaaaagccctctttgccacgaaattccgccaggcggataccgatacgggtagttcctccgtcgatggaacggtttcctttctttatacgggattgtactctgtatagatatggtgcatccggtgaccaaagtttcggattcctcacatccatctgctggcggattgatttcttttctccggagttcagagagagtttgctagacgtacgtttgataaccttgccttcggcatctgtaagggtcgtttctactgtgacggattccgaacgagtattattgttctgaatctctgtttctacgtatacttgtgcgctcttttcgctgatcttgtcgaagtgaacaaatacaccgccaccgccaactgtccgggagtcgatggcatcggtaatggcgaccggagacttggcaatcatccatacatcacgatagatacctccatgataagcaaaatccaatgtgtattgtggctttccgggagggtatgatttatcgttgctgttgtcggtatagacggcaaggaggcaggagtctccggcttgtacgccgtttgccgtcaagtccagtgtgaaaggcagataacctccgagatgttcctgaacacgtttgccgttcaggtaaagtacttgctttcccattgccgcttcaaaatgaaggagtacacgctgtcctttcgttgcggtgggaactacgaaatacttgcgataccacgcagggccctgataattgcggcaaccactaccttcggcaggcatcaactctactgtgtgaggagtagaaacgacctcccaggaacgatcgtcaaaatttacagcttccgccccccggatatcgcctttgcagaatcgccatcccggattgaagttatatacttgtcgcccgcaatcgggaagcggaataaatccggcaaccgatgtttcgggacggtaagtatctgctgcctgcccaccgaaggagaatagcagcagaaataggaacaaaattaaaaacggtcttttattcatagttttttcatttatgtaattcgtgcttattttttctatttttctatcattataataatgtctttctttctgttttctggtgatacctttaggtctgtcactttcccgtcttttaaagttgcttctaccgtcgtattacccggagcgtggagcttgaaatggacgttccattctttgggccaggcggggaacagaagtatttgtgctccattcgtttgtaagagcatctcttgaagtcctatcatgccgctacctccccagttgtggtcgggtgtccagtcatatcccggtccccagaaggcaggaaaacggtggggaccatccgatagctttgccagagaaaggcttttggcttcttcggtcagtcccagacaggccgcccagatgttgtcttgcttccatccggtgtgggaacggaatttgagtgcgtcaggatcatagaaataggtatcacgagctatttccagattttccttgcctactccgtagatgcgccagggaaataccgggtagagttgtggtgtctctatattgttgattcgttcccagcttttggcgggagaaatcgtttgtttccatactggagtcatggtagaagtctgacgattaagagaatccttgacttcgatatagcgtaatggaaccggaggaattgtttccagcatcttttgccacttttcattgttgtaaattttgatgtaagtctccaatacagttcgcagtgcggcgatggtgttgctggcgttgttggtcatcttgtaggtttcgcaggcagagccggggaacagtatcaggtgtccgtcgccatccagtgctttacgtccccgacgggaagcgagtagccgataatgttcgtcgaaaaaggtcagcgagctttcaatcaaaggcaaatacggggttatgtcggcatcggcataattcttcgtttccaaaatcatctggcaaaattcaagaatagtgtcccattcatattccagccacgcattgtattccagtcctttgtcaaaccaatccggacgtttgaaaccatattctgcgggattgggtaagccgaagttttctatctgttcggagaaacaggctccctcgtgttgccaatatacacggctgcggagttccgcattcttcaacatccggttatagaaattgaattgggaaggcatcatgtcgaagtcaccgcttttcagcattggccagtagacaagacgctgattctgtgcagtcatcgttcctcctccccactttcggtagtcaggagtgaatgcctgcttctcgtctatgtggcagggatcgaaggtgaacaaaccaccgttgaacttggtggggacactgccgtaagcattgcagcccagcatataacggaaaagagtgtagtttcgggtgatttctttcaatgcatctttcgcatcgctcttttctttatttccggcttctttttctactttgctgttctccttgttttcggtttcaccgatcgtttcgataaaactccgttgccagaaagcattccaccacaggcgggtttgttttttatcctgtgataccactttagacgatatctttccttgtggggcaattcgttgccaggctgttttcagaccttgctcccattgggtgacggtttccgtctgttctgtgtgtaacacaactgagaaatgatgctttttagaagctttcaaagaacgaaatccccaagtgcggtaatcggtcccggcatatacactgtctgaagtgcctgtatattccagattctctcctgacagataccctccgaaagtcagatttttaagaggattcatcatctgcgacttcacttcattcatcccttgttgggcaactgctatgtcaaatactgtctcttccgcattacgatgataaaacaaaaggcgtttgctgtccttttcggataaattctctaatgaaatgaagtcggcatatgttaccgtacctttcggaggagcccacttataagaacattgttgcccctctccttttctgatcagccgatcctggtatctccagttttcataaaatatttccgtctgcaaaggccggtcattaaccacttcaatgtgtacaaccggatgaaaaacatccgcccagagttgtacttgcgttcctccggcggagatttcaacatagccgtcgatcagctttaattcctgccggaaatcctttgcgtcttcaaaaggattgggagataaccggaggcgaaaacgtcccagcttcaactggcagttgttttcatcgaacgtaccgctcctgctcagataaaacagtatatccccctcttctacccatatgttcatgccgatatctcccccgccgcatggcatcgattcggaggagttccggctgggagtatcccagacgacattggcatgctggctccaaagaaccgacacgccaacgaatatcattgctatagccagataaaatctcttcatattctcaaattaccagttgtccgaacggaaagaccccaacggcagaccatcacaatatacatctccttccacataattctcaaatccataacggacagctaccggatgcggaactttatcactttttactagcattttgctgcgttcgatccatgctttcgccggatagaatactttgtcttcacctgccacctgaaagtttttcgattcgaaacagtttttaccgctgatccacatattcgcacgttcaaagctgacgacgatagtgtcattcttgatttcaatacttttgtaatagggactttctccgttcaccccctctactccgtacgtctttgttagtgcaaggagtgccagacgctctccggcagcctgtttctttgcgggatgaatacccttttccattcctgcatccagcagtacagccatgccgctgttagacacacgatgttctacctttgcctgtgcttcccgcagataggctgaattaatcacttctttacctttttcagtgataataccatagtcatagggagctatctggcaatagtagaaaggaaaatcaccttgtttccattcggcacgccagccgttaatcaatgtggcaaacatatccgcataggtatgggcacgattccagttatcttctccctgataccagatcacgcctttcatagtcatgccgatcaatggatgcaacataccattatagagtacggttggagtacggtttttcgatttgatatcagcttccgattgaggtatctttgcatccggaaatgctttcagccaatcagcagtcatccatgcctcgcaggcagaaccgccccatgccgctactacgagtcctaccggaacttctaatatttcattgaccagtcttccgaaataataggccgtcgcactgaaatcacggacactaaccggagccgcttctttccatgaaccgactacgtcgttctgtggggtaatggtagaagtacgttttaccgtaaacaggcggatatgaggatttttgctgcgaagaatatccatattggcattctctacaggttggttcttgaatcctttcatcggcatttccatgttgctctgaccggagcacagccataattcgcctatcagaatattattcagtgtctttggggttccatcgtcgaaagtgatggtatacggtccgccggcttccggagtggagactgaaagtttccatgagccgtttttgtctgctgttactgcatattgttttccgttccagccggtagtgactgttacttttttgttcggagttgccgttccccaaaggttggcattggtttgttgctgcatcaccatgccgtcagagaaaatagcaggcagtttcacttccgcatgcattgacagacaggcagcgagcagaaagcttgctaatactgtgcttgttttaattcctgaacttttcattcttatttgtttttattcgctacttcaaaattcaaaggtccgagcaatcctgcaggaagcagggtgttttctgctttccggtatttggcattcgtccatattccatcgaaaggagcttttccttcatcggcccctttgagtgcattcgcccaagtattggtcacttcgatttccagttcattcacacctttctttaaggctgccgtaatatcagcccgataaggagctgtccatatcgttccgcaatctatgccgtttacacggacagtagccagatcgcatacttttcccagattcagatatacttgttgggcttctttcactttacttttccagcggaatgttgttttatacactactgttccggagtaatagcgtatttgctcatcttcttctttgctccagtcaaagagttcctgtctttggatagtcttaccgtttgctgtaaaagtcacggtatattctgtagcttccaagcctgtctccgaaggttcttttactgaatccttcttttccttgcggcctttttccggagtttctttataatcttcttctgcagggtatacgatgaagacagactcattcggagctaacgttaaagtgatttccgtacgatagtttttttgttcgtaaggaatgtcggcggtaatctcacccgtcaccggattccagcattccggctttctgccgtcgatgcgcatactggcggtaaatgtacgtgtttcctcctgttggttggcgataaaataaatgtccccctgttctccttgccgatgtgtccatgcaatgtcttccggtacgatcagatcacgttccagaccgtatgaggagaaatcatcttcattatatggaagagaaggaatcagtatgcctgcttctttcagttcatttatcttttgttttacttccggagatagttctgtggggtctggattcatcggacgtggaagtggcaatactaatactttgtaactggctccacccggtaatgtcatcctaccattttcagctttcgccaaacggagtaacgcgtctttgttaaagctgtcataggcatatcctcgaagtggatttacccacttttcaggatcggccatattggcagaatgtgttacgcctacaggacgcacacgtaagggttgtccttcgtttgccaagcggattcgttcgctttccacccgctctgtaccgaagatgcccggtaaagaaggaactaaacgttccggcaatatcgaacgtcttggcatctcttctcctgtaaaaactgcaatatctaccactggatgcccgtattgcagcaatgattggcaacgggtgatgtattcacagaaagcctttgcacctttattccaccacgtctggtcacgctggaagaaaaggccgataccatccagagtcattcccggtttgcggtccagccaaggattatggacatatacatggaagaaaaggcggttgatgcctaaagcatagttgcggtccagtaaggctttcaacattcccggatgttcgtcccatgttccgcgtacttctgtgaaaccttctgcctggatgatattcttgccgtagatatgcgctccgctgatagcatccagcatatcattcggtttgtcgtgagttgggctgttcagccagaattctcccatgggaaggtctactttctgataatgcagtaatccgtcacttaccatggtaggcgctacgcattcggctgagaactggcaatcatattctttggcacagtcggccaagacttgatagaaaacgtcgacgaccagttcacctatcgttgtgcggacatcacgcagaatcttttcacttcgttcggcactctccatcggaatacctgccaacaatggtaaataaggcatcaggtcgtatccacggcgtttctggaattctgcggcaaaagtatcgctccagttctggcttccgcattcccaactatccacgtgcatatattttaatacgcggcgtgcaacgtccgggtttgtctttacaaatgcctgcgcaaaccagttgtcgaactgcttgcggacagcttttggattaaatttatcacattccagtccttttcctcctccggcagttgcgttcgtatgtccggtggcggtatgtcccatgcggagtagtttccactttcctttggggagagtagtcgtcagtgttctctctttaaaattgtcgctcggactatttttaaagggatctgtcaggttgataatctgtgaaagggtatagcaatcttgctcccctatttcctctttcttcgtggaggaagctacacgccataccagtccggctttgccttcccactgatccagtcgggcttcccggtgcaggcgcaattcttttattttcagattaggtttccattttgcggcatccatatcttcacttcccggttcactgccttcgggggtccagtagaagcggaaatagcgggcagttgtagcaggaattgcatgagtggaattttcatctgtattctgccatccctgacgtgcagggacgagttgtttcaccaaacggtaattaactccatcatcacttgccatcactttcaagcggtgtgcctgataattattgccactcagaatgatttcaatattgcggcaggtgaaaggctgttcgtattcatattggatatagcagggatatgatgaacggattactccggcatcatccatgttcacagtcttcttgatgtcaatatgatttcctgtggctatattggcacaggttattttagccggcataatgtctgccgcttcctcttttacaggcagggcaaataaagatatatcttcataaaaaccttcatatgcctccggttgcggcaagtatagtcctttgatattgccaccatcaacgattgtatcactccagactactttttgcatcgattctttcggagtcatccacggaccaccagccaatgcaaaaccatcacaaatatgcattcctaactttaatcccaggcggtcggcttcttccatgctgaaacgaaccatttcccaccattcgggagttagttgttgcgccttcccattgtattgtggcccttctttgatacctttgataggcatcagataagtgcctcccagtccggcatgtttcattgcttccaaatcagccgtaatcccttctttggatacggcgccaaacatccagtaccaaaaagtccaaggctttgcttcgtcagacggattttggaattgttcgcgaagtgaatgtgtttgcagagcattggcaggagatatagcagtacataccaataatgagattgcaaatatttgttgtttcagtcggcttttcattctaatctatatttttacttatagaaaagacgaagaacggactgttttgtactcactatattttccttgctcaaattaaactatttaattttttaggcagtattgctttctacaaaataagtctcatttcaccgcttcttctattcgggatactaactgcggattactgggacgtgccgcagttccgaaatcaataatctgcccctttctatttattaatacatagtaaggcatcctgtctattttccattgcttacgaattttctgatagttatctattcccaaataatcagtcacatgaacacattcaattccccggtttttcaatgaatactcattcaggcattcctcccattgttctttgggttcactcacacaaatggaatatataatcaaatcatctgtagagaatttgctgcgcaattgttttaaaggttccatttcagccagacaaggaggacaccatctggcccaaaaatcgaaataaatcacttttccacgattcttttcgagcacatcatagacaggtttcatgtatggcatacgtgttgtatgctttgagttctcatggaattcgccatataataaattgtcggaaacaggctgtggattttttagatatgatttggtctgattatagatctgcatcacctgtgcacgtagatgcgacattttaacgattgagtcaaactgtgtacgtttttcgtgaaaagcaagtgtgtcattagtacataaagaaccggctatcaacttagtatataaatactgattcatctcactctcccccattgtagccatgatctcttctatcgaaggattctttttatctctgaaagcgatcccataagcaatatatctttctgcttcatcagcaacatcgtataagcgtgccgagagtatgcctttagtatatagtttattgatttcaggtaaaagtgtatgataacggtccatctcttttctcgtttcaaacaagtatgacataccattgaataacagcgcataataataatcctgcttcagcaattcttcagtaaacagtactacatcttccattggcttgtacttcaccagatactcattcctacgttccaaacgaaaattataatccttttttaattcagcctcaaaatccttaacgtctgattccggtttcatattgtaattctgtatatagtaatatgcactttcagtgaacgccaatatctcctgattaagcttttcggcatcacctgttactttaggatgaaaaagatctttgaagtctatttctacatgtatgctgtctcccgggtggatataaagatgttctgcatagttgcggatagaaacctcccttaatttggcataaaccggaaagcggaaagagaatgaaccatctttttgtatgggcgaacgatactgatttcccatatctctgaaaaatgggataatgagagtcagttccttttcctgaggatagaaatcccggtttagaactttgcctgtgatgactgcttcttcagcatactcttccaatgagggattgcttttctctgtttgtgcagaagattcggactggaaattactctgggctttttgacggcatccggcaaacaacaaggtaattattatcagaaagtataaactgtgtttcattgtgtttgaatattagtatgttcgtaaatctaacatttaagagttcttgcctctaaatgtatgaaattatttttagaggcaagaacttttgacaggttatctatctcaattttagatatttcacattatatataattaatttatgggataaaacaggccgaatgctatagccaacgtacaaacttcctgatataccagttctttaccaattgcgtcaggatacaataggaaagcaaaatgccaatcagccaggggaaataacccaaaggaagagctgtcaggccgatggaacgtccgaaagctgtgaaaggaataagaatgcctactgccataattaagaacgtcagtcccataacaggccacgtggcccggctttgtataaatggtattttacgggtacgtatcatgtggacaatcaatgtctgggataacaaaccttctacaaaccatccggtctgaaacaaagtctgatgttcgggactgttacaactgaacacataccacatgaccagataggtagcaatatcaaagatagaactgataggtcctatataaatcataaagcgactcaggtcagatgcatcccatttgcgcggtttcttcagaaattccgggtccatacggtcgaatggtatggttgtctgtgatatatcatataataggttctgaatcagcaaatgtatcggcatcatgggcaggaatggcagaaaggcgcttgcaaacatcacgctgaacatattgccaaaattggaactggcagtcatctttatatacttattgatattaccaaatgtctttctaccttcaagtacgccgtcttccaataccatcaaatccttctccagcaagatgatatccgcactttcttttgctatatctaccgccgaatcgacagatatgccaatatctgactgacgcaaggcgcctgcatcattgatgccatctcccagaaaaccaactgtattaccttgctcctgcaacagagagattatttgcgtcttctgcaatggagtgagtttggagaataacgtagtgtcttttactgcttctttcaatgttgtttcatccatttcctccatttctattccggtaagggagtgcccggtatcaatccccacctgacgggcaatagctttcactacggtatcattgtctcccgacaatattttgaccgctactccatgcacatataattgttcgatagcttcggtggcagaaggtttgggaggatcaagaaaagcaagatatccgatcaacaccatttccttttcatcttcgatggcaaaattacagtccttttcgatgaaacttttctgggaaaccgccaatactctcataccttgccggttcatttcctcactgatcttttgcgcttttattttcaaggagtcagtcaaaggatgtatctctccgtcgaactcggcatacgaacagacatcaagaatctcttctaccgctcctttggtaataatttgccgcttcccttgcctgtcttctataacgacagacatccttctgcgtgtaaaatcgaaaggaatttcatcgactttggtataggcattcttcaaatgttccagattcaactctcttacatgagagaggattgccttatccatcaggtttctcaagccggtctgaaaataactgttgaagtacgcgtgacgaagaatacgtttactgttgtcatcactgccgtctgcattgatatacttctccaacacaattttatcgcaagtcaatgtaccggttttatcagtacaaagtatatccattgctccaaaattctgaatggcattgaggttctttacgattgttttctttttggacatggcgattgctcctttagacaggttagccgtcacaatcataggtaacatttcgggagtaagaccgaccgccacagatacggcaaaaatgaaggcttcgaaccagtcacctttcgtaaaaccattcacgaaaaacacgaatggaaccataaccagcataaaacgaatcaataaaaagctgactttgctgatacctttatcaaaggctgtagtggcacgatgtccgaccagacttttggctattgtacctagataggttttatttcccgtctcaaaaacaattccttttgccgcaccgctaatcacattggaacccatatagcagatattgtccaactctatgacacttcctttacgaaactgttgtccctgtacttccggaaacttttctatcggttcggactcacccgtcagtgaagcctgactgataaacaagtcttttgaatcgatgatacgtatatcggcaggaaccatatcaccggctgccaggtacacaatatctcccggaacgagttctgttatatcgatctcttcttcctgttctccggcacgttttgccagacaagtgttttttaccatcttcattaaagaatttgtagcttcacttgctctccattcctgccagaaacgaaggatagcactgaataataccatggacgaaataatgattacccctgcccattcttgctctccgggttcagccatcaatacatccagaaacaaggatatgatggcaagtcctgtcagaacgcctatgaaaggattgataaacgttctgacaaacagtataaacggattctttttctgttcatggatgacttcgtttcttccataaatggattgccgctcctgtacttctctcagtgttaatccaagctttgtagtctgcaaacaggaataaattgacttaccgggttgcgtggcaaccaaaaatactctctctgaattgaatgtgtactgtgatgaacgcagttttttcttccataccatactctctaatttttttaagttactaactgcatttattaattcgatgcaaaagtaaggaggacttcgggaggaagccgttagagaatgattagagtggtattagaaaactattagagtttcttagatatgcgggagttttaccacaaaagtagttccctcgtccttatgagaagatacggtaagttcgcctttgtgaaggtgaatgattttctgtgtcaaaaccatgcctataccatttccggaagctatattcttgttttctccccgataaaacagtttaaacaggttttctttgtctgcatcggacattcctacgccattatcagacaagcggataatagcccattgttcccaataagctatcaggacggatgaagtccggttggaagagtacttgcagttattctctaccagattcacaaaggcagtagtcaacagatagctgtttccgattacggtcagcacattatcttcctcggcttcctgctcaaatactaattcgatatgataatccggatgggcttttaggactaattctctggcatccagcagcagttcatccaaccggacctcttccattgtaatctgttccgactgatagtcggcttttgcaagattcagcaatccgtcgatcaggtttatgatccgtcgggaatcttgtagtgcattgccgatagctgcctgatattgtccggaggttcgttctttcaacagggccagatccagttcggctgtgagggctgccataggtgtacgtagttcgtgagatacattgctgacaaacatcttttgtgagttgaaggacttctccagacgttccagcagtgcattgaatgtaatactcagttctcccagttcatcctgttcatttttcactggcagtcttttgtcgatatgtgaggcggtgattttctccgcttctctcacgatattgcgtataggctttaaggtgcttcgggagaggatatatccgacaaccgccaacacggtcaatcctccgataaataacagaatgagcatatttctcagtgcatcccggttagcgtatccatagccatcataggcagcggcagtgacaatgtagtcttgcccttcaaacggatacacaagtcctattgcctgatattcgtccacatagaaactgatattctttcgtttcagaatacgttttaccatctcgggtgtttccttgactatgtcgttttgaagggcatcatgatacagtattttaaaatctgtggtatagacggctacctctacttcattaataaacttctgattgttcaggtaaatagactgcattgtttttgcatctacttgattattaagaaataagtgagctttggttatagcttcactttgcaggttgcgaaagaaggcattgctgcgcgaatgctcgcttacgtaatagacagctacaacaaatgcgaagaataccgcagctgtaatgcccgcatattgcagagtcagcgttgtccggattttcataatttgtcagtcagtatgaaacccatccctgctttggtatgaataagtttcggttcaaagttacggtctatctttttgcgaaggtagttgatatatacatcaataaagttggttcccgtatcaaaatgtgtgttccagactttctccgctatctctacccggctcaatactctttcggcattttcgaccatatatagcaacaggttatattctttcggagaaagtttaatgggaacgttatttcgttctacgtctttccgctgaagatcaatgcgcagatctgcataaacaagttcctgcggtaactccggtacatttcctgagacacgttttaatagaactttgattctggcattcagctctctgaaatcaaagggcttcaccatatagtcgtctgcaccggcatcgaaaccgtccagcttatcgttcgttgatcctaatgccgtcaacattaatataggaatacggggattggacttacggatttctttcgtcagctcgaatccgtccatcttaggcagaacaatatcagatataaccagatcgaacgtatgtgcctgaaaaagccgcagccccattaatccgtcataagctaccatggtctgataaccattttcttccagcccgttcatcagcaaacttgccaccctgggttcgtcttctataattagtattgtgtacataggaaagaactcgttaatctgaatctataaaacgaaacaaaaataatgattattcctcacttatgactcttttaaaccattttatatttgctatatttacattaaaaaaaggtacccaacgcaatgtgagtacctttttatttcatttatttattccataaaccggaaaatgattcgtccgctctgcggaccattcacccatttaggctgcgatgacgggccacatagatctgtagaatttactttattacgtacaggaggaatcacattcaagacagaaattccactttcaggaagcgtataaagtaaacggtcacgaccgtcacgcggctgatatactccgatataagcatccggagtttcattggtcaggctgatagtaccctctttcgtgcggatgttcatccaggaaacactgccaaaatatcctttgaattcgggatatgtgaaagtttcacccggaataggatcgttatagtcgttttcccagacatcatattgcgtgccatgaatacggttctgccatacacgatagggccccgctcccagccagcgtttactgatcacctgatcttcgggatagtcgaagcagattcccattaaatctaccacgccggaaaaattgtaggtataatccagcaccgcttctccatttggattgattgtccattgcactttatccagattacccagtttataatcggcagtaacaatcagattgcctccgtcttcttttacatccagttttgtgaatacagcagcatcagggaattcgctgtaggtacgatccttttctttcgctttttcgtcatcgtgattataaaactgatccaatgagcggtcggcacgacgggcaccgatgaagcgaggtccgttggcaaagctgatcttgcgattgtttacagatacacctttcagctgaccgtctttctttgagaaaatgaaagtatggttcttcgcttttacggtaagttcattttctgtttctgtagaggttaccttattagataagggagagagcacttcattagcctgattcagtttgttcacagggaaagtccagcgccaaagttcatgaccgtatcggtcgatggctgtgaggaaaagggcatcggcatccggaaggatcgttgttttaatatccagcacacctgccgaatgggctgcaacatcacttccttgtacttccccttgtttcagaacttgagcagttgtattagaagcatctgttgcggtagggaacttcacctgtttccaaaggaaacggcaagtgttcagattcagaaaatcataacggttttctacagagaacttaccgtcaaactgcttgtcgacagaagtattcatgatttgtaccggactccataactgcttgattgtgtagaaactgccttccttttcatgatgtggtcctacaataccgtcagcgccgaaatttccttgattatcaatgaatccgtccatatcgacacgcttcactccttcgtccgccagtacccaaaggaaaccaccgatacagcgggggtgtttacgcatcatttcccaatagtcgtataatccggcaccatgaccgccatcatacaaaccgtggagaaattctgtcggcataaagatttccggcaagcgcatatagttctgactttctccgtaagaacggtaatgcatggtttcaaaaccagagaaattgccttgcggatgaatcaccggacgtttctgcggatcgtacttgtgaaattctccatcgagttcggtattccatcctttttcattaccattactccaccagataatagacgggtggttaacgtcacgttctatcattccttcgatcaggcgtactccggtcggagtatcgtatttaccatgccagcctcctaattcatccatcacataaagtcccaaagaatcacaagcttccagaaactccggatcagccggatagtgactcagacggacggagttcatattcatgtctttcatcagaagaacatcttcgatatttttcgctttacttaatgtacggccactttccggacggaagctatggcgattgacaccacgtaccataatgcgtacaccgtttacgtataatccgtcactttcgcgtacttcgatggtacgaaaaccgaatgtttctgtctcgttgtgcagcacttttccgtctttgtccagcaaagaaaactgagctttataaagattcggcgtttcggctgtccacagagccggatcagagaccttgagctgtaaagaagtccagtctcctcccgcttttacagggacggtcgtttcagttagttttttgcctttattgtccaaaatctgtgcccggatactcattccgtcattagacagattggtatagcaattggcacggaaggaaccatccatttgcgcatcgatggcgatatgacgtaaattaatcgcaggttttacttccagaaataccggacggaaaatacctccgaagttccaataatcggcacgtcgctcggcaagattcacactggcattttcgctttcctttgaaacggttacttccagcaggttcttttttccatacttaaggaaatctgtgacattgtatgaaaaacgatagaaagctccctgatgtttcgagccgactttacgcccgtttactttaacttcggtatctgtcatcgaagcttcgaataccagatttacctgctgcccgcggaacttctcggggacctcaaactcgtacttatacattcctttttcatcggctataccttcggggaatgctttgccataaaaggtgattccatactgataggtgccaaagccctgcaactcccagcatgacggtacaccgatcttcgtccatttgccggaattgcgtccgtcagtacagaagaagtcccattctaccatatcatcacatccgtgaccggaaaggtattgccgttccgtttgcggaagggtttgagcagccagagtagttgccaacgccaaggttgataataaagtggttacttttctcattgttacttttattattgtgttagttactatttatttgtatcaattcttattttactgcttgctgatgcgtatatgcagcgtatgttcttttttctcaatagcatacttcttcagtacgcccggtccgcagctgctattccctaatccgagcacggccgcgtccatactgagaataatttcgggacgtggcttcagattgcagtcatgagtttctttatataaatcctgtgcagtataatgcaaagcagaggcagaaaatacatcttctaccgcgtctacacggatacctttattctgtttgtctgtcagcgtaaaaaattgtacttcttccttatttccactatcctgcggacgaggataatgtatatactgttctgctaccgttcctttccagagtcctgttgcagcagatgtcttgcgatcgggataattatcctgcggtcctctgccataccatgtaaaggtattataggcaggagccagacagaatgcaagccccaaacgaggcaattccggaagtactccttgcggtaagaaagttgttttcagatcaatgactccatcggaagaaatggtatagacggatgtcgttgtcacgttaccttctttatataaattagtcgtccggatacgtactatgactgccccatctgcacgtacttcatgatcgaaagactccagactaatcagaggatggtccatgccatgcagttgccagtcttttgccagccagtttccgaaactcttgtcattgtctgtcggtgcacggaatgcttgcgtgacaggctgaaccggaaaatgattctgagtcaatatttctttgccattgtacataagggaagttatacttccgactgctttcttttcccactgaaccgagaaaccgcgtccgctaactgataaagatttatcatcctcttttacttgcagcgctcctttattgatcagatcggcagacaacaattctccttgctgtaagcagaattgttcccaagtaacttcatgaccggctttcgcccaaagagcatcagatttcaatacgatgcttacttttagcagacaatcagaaagcgtattcgttgagttgctgttgttgccttttctgtttaaagccttcttgtccgataaggaacggaaagctggtaaagtaattgtttcactctcacccggagcgactttcggtaatgtgatttctccctgttctttctgtttaccatctattgtcaatgtccataagcagcgatactgagataagtctatatgatgattcctgtttgtaacgatcaattgtccattgttgacggccaactgaaccggtgcatatactttctttacttcccaatacttcggagtcgtctcacgatcactcatcaatagaccattaaagcagaaagctttcagattcggcttatcaccgaagtctccgccatacgccaccataatgcggccatcaggcaattctttataaattccctgatctacccagtcccatatgaaaccgcccagcatacggggattgctatatatttcatcccaatattctttaaagttgcccaacgcatttcccatcgaatgggcatattcacttgtcattaccggacggtcatcattggtacgttccgctatttccaacagtcgttcccaacgtgcattttccgcacgttctttgtcttctccttctgcaatgcccggattcagatattcttgtttcacacgggtatagaaacggctgatcacatcgaccgtcttcggatcaggattgccatctactccctgcgcaccttcataatgaacggggcgtgtaggatcaaaatcgtgtaaccatgcagaaatagctgcaaagttcggtccgtagccgctttcattccccatactccacatcacgatacttggatagttcttatcacgttctgccatgcggactgcacggtccatgaatgcagcataccaatcgggagtacttgccagtgtcccgcgcagaccatgctcttcgatatccgcttcatccatcacataaagccctaaactatcacagagttcataccaacggctcacattgggataatggctggtacgaacggcattgatatttgcctgtttcatcagcagtatatcctgaagcattctttcttcactcattacgcgtgccgtccgtggatcgtgttcatgacgattcacacctctgaagcgaaccggattaccgttaatcagtaattgtcctttattgatttctacagtacggaaaccgaccgactgctccgcctgttctatcacttttccttccgcattctgcaaagtcaggtgtaatttataaagatagggtgtctccgctgtccatctttccggtgattttatcatggctgacagacgtcctgtcttacgtggtccacgctgcggataccactcattcatccggcttgctttatgctccagatccagtatttcttccacctctccctgtaactttactatctcctttccacttacgtctttcaacacagcttgcagggtatatccttttccggtcatacctctgtatacactaaattgcggatcgatctgcaaaataaagtccttataattgccggcagatgcaagaagagtgcgtattgtataatcacgcatacgaacatcaggtgtatgtatcagatgaatactacgatgaatgccgccaaaacgccagaagtcctgatcttcgagataagacccgtcactataacggtacacttccaatgctatctgattctcaccagtcttcagatagtcggtgatgttaaattcacttggctccatactgccttggctataccctacccgttcgccatttatccagacatagaaagcactcatcactccttcaaagcgcaaaaaagtctgtccgtccgcttcccatcccacaggcaaaacgaatgtgcgccgatactgtccgaccgggtttcgttctttataggtcgtatagtcagctttcggctctcccattactcgcggaggatctatcttaaacggataacctgcagatacataaataggtgtgccatatccgttgacttcccaattggcaggaacaggaaagtccttccagtctttatcattaaagtctgtctgatagaaatctatgattctttcgcccggaacaggagtccatcggaacttccatgttccgtccaaagacatcgaacagtctcctttctgtacggagaaaggagtaaaagcagcccgtgccggttcacgattaatctggagaacatgatgattctcccagtcatgcattgtttgtgcctgcatcgggcaagcgaccaatgcgccaagcagtaatgtatatattttcattcgttcttttttcttcataccaagaagacggacgaaggggcattttgtacccctttcttttacattaatattgaagaataataaaaggagaaacactctatgaagggttgtcttgtttcacacgcacagtatgagcatacgattgaagattcggaactaaaactgtaattaaaataagaatatcaattattaaaatgcaaacatcgttttaacgattaaggtcttgcgaattaaaatactccttcagacaggagtaaaaacatatatgaatatcgcattatcttccgggaaatgtttttctttgttatacattcatgtcatttatctcatgttctgcattaaaaaacaaaagaaatggaagagaataaacaaacactttacaatgatgagttactagatatcctgcctgacggagttattatatttaatataaatggagaggttatccagcttaatcgccaggctcaaaccgaacttcatgtccattcatcagccaatgagatgatgcctctttcaaccaatgacctattcaagttattaaataataaagaagatattctttctgtcattttagagaagattcgtcagggtgaacaaacatattcgcttccggagcacacattcatgcaagaacagattgattatacacaattcccgatcagaggtgattttgcaacgatcaaggaagatggcaatctgaaaaagatcttattcttttttcgtaatatcactgtagaactgacacaggagtatattctgaacacagccttacaaagaaccaggatatatccgtggtattatgatataaaccgaagtgagtttaccctcgacaaccgttatttcgaacatttaggtatttcggccggagaaaacaacactctgactatggaagaatacgtaaatatgattcatcctgacgaccggcaagctatggccgacgcctttattgtgcaacttagcggcatggaaacgttcgataaatctgtccccttccgcttgcatcgtggagacggaacttgggaatggtttgaaggccagtctacttatattgccaatatctcagggcatccctatcggttggtcggtatctgcatgagtattcaagaatataaagacatagagaataccttaatcaaagcacgtaagaaagctgaagaaagtgaccgtctcaaaatggcttttctggcaaatatgagccacgagattcgcacaccactaaatgcaatagtcggcttctctgatgtaatcggttccacttatgatgaattaagcgaggaagaacgtgccgattttgtgagattaatcagtatcaacagcgaacatttagtaagactgattgatgatgtacttgatttatccaagattgaatcaaataccattaaatttacttttactgactgttctcttcaatctctcatgatggatatagagaaagaacaagctatgaaacctatatccgaaatagagatcagagcatcatttcccaatgaagatgtctatattaacacagatgctacacgtctgaaacaagtcgtatgtaactttattaacaatgctcgtaaatttaccgaaaaagggtatattcattttggttatgcagttgacccagtcaatgcagactttgtgaatatctttgtggaagatactgggtcggggattcctcaagaatgccaaaaagatatattcgaccgtttttataaagtagatacttttaaacaaggaaccggcctgggactttctatctgcaaaacgattgtggaacatttgcaaggagatatttctgttgagtctgagatgggcagaggcagtcgttttactgttattcttccatttgagagacaggcagtaaattagtgccctctgtattcctgcggagtgacaccggtatgctgcttaaagaatttattgaagaaagagatattattgaatcccaaagacaaagcgatattcttcacaggttcattacttgactttaaacgagacttagcatccatcagaatgacggaagcaatgacttccagcggggtattccccgctgcctttttaattgttgaacaaaaatgaggcagactaagtcctaaatgatcagcataaaaagaagcgccatgatgaactgtataatacttcatgaccagttgcaggaactcctgatatatctcatattttcttgattgagtagataaataccgattgctctgtagcttataaatttctgttgctccctgaataaacatagtaagtacagcctttacgatctctttattggccaatgtcttggcagaagcatacgcaagaatcaatgactcataaaacatcttatagctacaggcttgcaatggagacaaattgataaccggattttctactattatcggaagcagatgctgggtggatttcatcaaatttatattttctatgaactgagatgaaaaacctgcataataaagatgaatatcagacgagaactcatgaatttccatgaaataattaggtggcagagtaattaaatcattctcgacaatattatatcgttctccattaattgttgcctgtattgttcctttcacacaaagtataaagaatcccgcctctattttacaatgaacatttttatacccatttagcaagttaaccccaaatccttctcccactatataatcaactgttaaatcgtacctcggtatatcgctttccatcgttattttgtttttgacttcaaatatagaaattatttaaaatcgatgcacgaaacaattaaaatccgagtatcgaatcataaaaaaataacatatatattctatttataagaaaaaggtttcaaaataagaaacgggacgcagaaagctatacaagcttctttgcatcccgcttttttacttctattatgaaagttcagtttatcggcagaattattgaatatccagtgcatcaaaagccagaccgtccatattttccgctgaaagtaatactttataatgtccggcattgataaaagttccggtagtggtactcatcatcttccatttgtccggtgtctccgggaaagtcagaatgtcttctttgagcactactcctttcgaatcgatgaacttcattaaaacaggtattggttttccggtagcattcatatatttaaagcgaagggcataaacctgtgccagtccggtagagacattccattcaatgctgttcccttttcctttatcaaagaatactcccgtttgcttgcgatgttctttcttccggaacttgcctttcagggttgccgtttcagcttcatacgctacactgacacgggcattcttatcttcgggaagcaactctttcggagtttttcccatgacttctttgccggccttttcccagctccagtcggatgcggggaatacagtcggttgcagattcgaatcaacagaagcaatggcaatacctgaaatcagcccctgtcctgcctttacttccggaaagtgaattttcagtattccaccttttacagtagcgtacaccactttcttacatactccgtcgtggccactctctgcccaaatatcaagatcatccaatactaccgaatcatttactgccacatcgaagatgcgcaatccctcgcagtcggtggaggcactgcctcccgtcccatgccaaggctctgtgaaatagagttcaatccgatatgttccgtcagttaccgggaaattgtactccagttgatgacgtccaaaacggaagtgttggaacaacttccagtcacggcttccccgaatcggatcattcgtcgtgcgctgactggcaaggtatggattcaattctttaaagttcgctgcccatgaacgggaataatgggtattatcctgcatccataactgaccgaaactatctgtatagtcgtctcctccacagttaatacggtacaagtaattatatccgtctttccctttcaatacaggtttcgtattctgatatagtacgtcaaagtggggagcttgctccagtccgttgagtacaattatgtcctcggcgaccggtttccctttatgatatcctacagcacgaagtacattataacgaatatcccgattctcccacatgaagtgggtacctgttccattattctttttacgtcccagataagtcactttgtcattgatcatgtcgttataaagcaatacggaatcacaattgctgtaagcctcgatagtagcccgacgacgtcctttctcgaaacgatccgcccaggtatgtgataccagatataccatcgggtcctttgccgccggcacatagttggcacgatacatataatatacatccagtggttcttcccacggagtcaccagtcctttatagttgaacggacctactttatctattttccggaatgcttcatccggctggcgacgtccgggattgtcgtggctgctgaaaatccattggaactgtccgcaaacactgtctttggcctgttccgccagacgaatctttgtttccatcaactgacacatacgactttcgctccatactccatttgcttcaaattcgccgggttccgtatgcagatcaatacttctccatgcaccgtattctccattcagcaactggttcttctgcgaaagttcctttccgtatttcgtaacgtctcctccatacgtgccgctccagttctgaataacattccagtcggttccttcaccaccgttgcaggtggtgatgatacgcatcgtacgtgctgtcgggtccatttcgcgaatgatttcactgcattcctgtgcaaattcacgaggcaatgtactttcattctgtaatccccatatcactactgacggagaattacgtcgttccttcacccattgacgaagcagctttttaaagttctctcgaaactccggtgtgtcataccatacatgggcagaaagttgtgtccagaacaagacgccttcttcatcccaatatttctgataatcgagatgatggggctgatgggcatcacggaaagcgttgaagcctgccgcacgtatttgtttcactctcgcagctacctgctcccgactgaaggcatgactttgcccgaactgatgctcatactcgcatacaccattgataaagacaggctttccattcagatagaaacgaccatcttcgtcatttctctttaccggccaactgattgtacggataccgaaaggcgtagagatctcgtccgttgttttggtatcacgcttaatcatacttgccaatttataaagatagggattctccgtatcccataaaactggattctctacaggagactgttggcgaatcaccttcatctctcccggtgccaatgttactttctctaccagacggaacacttgtttaccgtccgcattgctcaacttattgactacttctattgtctccgtggtcttgccatagttctttacttctgtttcgacaaagacattagccgccttttcgtcattccagatgtgtactccgaagggttcaatacggatctcgtctgttgcctccagtaccaccggacggaatatacctaacggctgagatccttcgctgaatccccactccgacgaacaaccaccacatacccacggcatatcggctatcatttccggatgctctgcttttacttccagacgattcgttccttgtttcaatgcatcggtcacatccagtgtcaacgtggtacgtcctaccggatagcgtccgaaatcatgtccgttcactttaatagtagcatacgtacctaccccctcaaaacggaggaaataacgtcgcaagagtcgagagtcgggtgttgagaattgaaacttatcaagaatgaagtcttttatatacatcgcggttccgtgcagattgccatgagtcaactgacgatatccataataatcatcccaattgtgaggaatattcacagtcttaaaaaggttttgaggtatagaagagacatcaactccatcttggccaacagatctcttcattcctaattcttcgttctccattaaccaagttttccagccttcattcagttcggtaatcatccggcgattcttcgtttccggcttcgggaagcgaacggcagagcgtcccatcggcttacttgtagcaacagcgataccacgctgttcggcattgttcaccgcacaatagaaatgataaaccactccgtcgtgtttgatcacatagcttttatgtgcaaataattcgtcgtaattcttggaaggaataatcaaatcagttccatgccagtctgtccagttgacgagatcataactagcagcaaacgtattaaaggctttatacttgcgtgacggctcaaaggcagagaaataaaacatcacgtatacgtcacccatcttctgaatatgagcatcaccggtgattgttccatccgcttcgtgtgcaaagaccggattgccgggataacgtttccaggttttcatatccttggaaagtgcgattcccacccgttcaccttttaaatcagttttcggatgacgtcctcccgcattgtaaaacatcacaaacggagcacccagtgttttgtctttatcccagtaaacggtacttttatattgagtcaacttttcccaccactgcgcatctttatcatggatgctcagaatcggtttgtccagagactcccattcatgagcggtggaaatatctcctttggtagatgccagtccgacaaagagtggtgcttttacagcttcataacctgtaccttctccaccgatgtaagtcatccagtggcggcctttgtaggtctgaagttcgtagcttccaccccactccatatccggcagcgcgggaaatcctccacgctgattacaatcccatttaccgtcccgataagaaagcacacgtcctaaggtacgccaatcaagcagattatcactttctgcaatccaggtttcgtatccacgaccatccgtgccggttttgccattataaacgacataagtcatcagccacttgtctccctgacgaaagacagtaggacaatcgatcttatgataattgtcggtcggggcaacagcaagtccgtacttatagggcgtctttacctcttcataaatctgctccatccgttcctgcgtgacttcacgttgggcatacagtgagcagtatgcggcagctatacttaaaaatgtcagtaataacttcttcattatacttttatctatcatctatttattgactttttagtcagccctttacagcaattgttcattagtaaaacatccagtccatcgtttcttcgtctccggcaagtccggcattacgagttttcacatctgcagccgtaaatccaaggacctgaaggtagcctttgggcaacatcaacgtatgttttcctgccggaaagctatatgcgtgtatatttgctaatggcattccattgatatggattgcattagtcagtacaggttccgcctgaccgtaatcattggcagatgcatcaatctccagcttcggggctttggcatacttcttttggtcgtctttaaaataagctaccaacagtttgaccggagcatttgtctcaaagataatgcttgttcctttttcacgttgttcatttccattaaagcggaatgccttcatccccttcagttcaggagctattgcttctattttgcccggaagatccgtgaacaaggaagtaccttcattcagttttactgtcggataattcgatattaagttcacatccgcaggagcccaggcagtgatctctaccgtttcagtcaccgcattgccattttgcttttctttcagcatggcaaggttcgccttgaagttctccaactctttttcgtagtgcaccagcagttctttccatgtcttattatggccatcgtctccaccgataggaatacggcgctgggcagtctgcatactgttggcatataaataatgctcgtctgtcagttccaccagtttgcggtaatgttccagactttgttccatcagagggatggcttcttccaaatttttcatgtcttttccccattgatagtccaataccagtttcgcagctttcactttcagattaaacgcataggcaaactcacggtaacaatgcatatcattctgcaaacgtgcgaattcttctttgttggaggagatggaaccggctgccttgtcaatcgctgctattgccttatcaccgtgttcaatcacctgagcgacaatatccagcggcatctcacctacatgaggctgattcttccattctttctctacaaattcgatcagcttttcgccttccggtccgcagctttcatagaatcccggatagatggtatatttgtacggattgacaagctggctcataaacatccccaacaataacgtctgacggtttccttccgtgataccaaaacggcgtaataacttcggagcaatttctccgctttcttcataagcaatgcgaatattgcctgcattctcgtcggatgttccgtagaactgtcccagttgatgattccagtaaccgatctcatcggcacgatcccgatggctgttccatgcataacgtccccaggtctgataccagatccagtcgcggtccagttgaaattcccgttcgccatttggcagtttgtcggctgtatacggccaatcccagtacgaagcctgcggataaagatgcagtgcattggcaccgtgcacgttgtgcatcgcttgtaccgccttctgtacgaagtccggagagccccaacggaacggttccagatttgccaggatatgtacattactgatatgaatagatcctaaagagctcaaatccgtatgaatcttcgaccaggggccacgaggctcgtaagttgtcagtgattcgccattatacttatgcatcgtataaagattcttatatatcggcaatgccgcatccattaccagtttgcagtctgtatcgtgtgcgcgcagcaaaagaggcggttcgtcggtacgtcccaatgcctgtaatccgtcttttacacccggaatgatggtctttgtgaaccattccacatcatcttctaccgtacacatggcttcacccaaacaaaccagcagtcccacattcggatatttctctataaatgcagcaatacttttacgggtatagtctgcaatcagaggagtaatgggacggttacggtcctgcgttttcagtccataatgctctgcaaatggtttggaaaggatgatattgtagaacatctgtatcacgaagataccacgtttgtccgcttcttccgtaaggaaagaaaacatctcttcattcttcttgaacgtctcttcgtctacttccagcgcaaacggataatcttccagtttgactaacgatgcaaacggatgaccattccagagatacaaggaattcatgcggttggctaccagcatatcgaggtatttaatccattgttccttatcataaaaccaagggaaactttccggagtatacggatactcatacacaccgtgtcccggcaggtaagtcatcttctgcagaccgacacaagcgccgcggagcaccatttccggaccatctttcaactcttccggaaagtcaagcttgccatcagagtcgttcacacggtctatcagttcgcgacttccgtagatcactccgcttccgtctctgccgcatactcttgtcagattaccggcagtcgtaatatgaaagccttctttcttaagcgtcgtatcattcacttccgtcagcagaatcgtctttatttcaggatcggagaatgtggtatccccttgttgcatcattacctgataaccggctttatccagggtagactgtaactgttccgcactgaacagaacgcggtttgacgcatccggcggagtcattattttcacggtttgcttaccacacgcagctaagaaaagggtgcatgccgcaaacatgaacaatttggtatttttcattcttctgatgtatattataaaatgtatagtttcattcttttataaaaagaagacgaaataactccctgtttgtactcaatttgcccatgtttccacttcttaaaaccgtcataaaagaacgaagccagctatatttctataactggcttcgttcttttaccattctccttttcctttttccaatggaatgccatcacaaaaatgcatactggcatgagttccgtcacagaaaggtttattcgatgactgtccgcaacggcacaatgtcaccctgtttctcacttcatagcttttgccatctgctccttcaatccgaatgccgccttttacccagataggtccgctgactttgataccgggatcttctataattccgatagatggcttaaatggcggttcgaagactttctccgtatctttatcccacacaactaatcttcccgatggacaatgtcccgcttcccgacgaaccagttcccgttcttcttcgctctctgctttctccaccagattccatatccgtccacgagcatcgcagaaacgtgcgaaagcgcaatatctctcattatcggccagcatcatggtaggaccatctatttcctcagcatcttgcaacaaaggacgatgaggagctgtttctctcgggtcccagtcagcgtgcttatgcgatccgtcgcagaatggtttatgtttggaatgcccacatctacacagatgaaccggattctctgaagtttcaaaatgtttccctttctgatacactcaagaagaaccttctgcattcggtaatataatctcttggtcaatgggcggattgccatacacaaaatatggaccgtcagctgtaattttgatgtaaaattgttcaggtgcttctctactaccctcctcgattgggaaattttcttttttagtcataatgatacgtattaaagtgttcatttatttatgtcagccatatttataaaacagatggcaattgcaaaaagttccggttctgcaatacaatatctcaacttttcgaactaaaaagtatatctttgtacctcatttatcattattattatgcagacttacatagaaacatcccgtttaattctccgcgattggaaggaagaagatattccggcttttgcccgcatgaacgccgatcctcatgttatggaattttttctccatccgctgactccggaagaatcacttgctttttatcaccgtatccaaaatgagtttcagacctgtggctttggcttgtatgctgtagaacgtaaagaagatcatgcttttatgggatataccggactgcatcagatcacatttgacgttgattttgctccgggtatagaaatcggctggcgattggcgcacgaatattggggacgtggttatgctccggaagcagcaacagcttgtttggagtatgctcgtgagagtttagatatcaaagaattgttctcgtttacttctcttcccaaccaacgctcggaaagggtgatgcagaaaatagggatggaacgggttagagaatttggtcatccgcttgttcctgctgagtatccgttacatagacacgtgttgtatcacatagatttaagaaagcattcatcgtaaggtattcagtgcaatgacataaaaagagaaagggagtattgtagcgataatttatcaattcgcttagaagatacagaacttttcaaaatcagcaccaacatctatacgaaatacattgactaatgatacagtaacttccagtcatttattaataaattctttcatcgtttattataaacgtcctccaagtttattataaactctaatttcgatcttgctgcaaggaatatcaattttaagcaacaaaaagggctgcaattcccataaagaatcgcagcccttagcttgtgtcagactatccaacaagcattacccggagtgggaatgcctgcaaactgttattatattatacttattattgctcatttttcgtctatattatcaatgttatcgaatttacttccggttttcacttacaaagatacaacattaaaagtggtttgtcaagtcctccatgcttctttcatacatccattcagatttattccgtctttataatctccgcaggattaattcgtgccgccttattcacttgccagaacaatgtacctgcggaaatagctacgacaaccaacaaagctatcacaaagatagaaatgcttaccggagttttgaccacaaaatctgatgtatatatgtatatcagatagtatgataatggcatcgtgagtaatgttgcaccgcctataatccatatatatttgcggaacaggatggaataaagattcctgagccgggcaccattcactttccggatggctacttcccgatatcgctggcggatatcaaataacgaaagaccaaataatcccaaagcggaaacaaatatagagatagtggcaaaaagggtgaagacagttacaatgcggcggtcgtcttgatacagtgccctaatatcatcttttagccaacgataatcgaactcattagagttatagatgtcttccctgcatttcttaagataatcaactaattgtttttcttttcccggcacacaggatatttgacactgggcattaattcctgcgctggatatcatatatataatcggctttttaccagcagtcaaatgtccagagtaataatcttcaataatagcctgtacaggcatcaatgacaatccaccttctactattttaccattagatatagaactccaaagtgaactttcacctttgacgaatgcatcttcccgacgggtataaccaaaagcttttaatgccgctttgttcatagctaccagataatcggcatgcccatttacttcatcgggcaatgaaccatcaactatatgcaatccatataacttaaagaaatccactgttacccacatcattgccatatttaactttcctcccttatcatttatcatacttgacatgctaccagccgataaaatgccttcgcgaccagtatctccggcaaaccagtgttcaatatatgggcattcattcagcttctgttccataacttctctgtcatgccaccgcttattttgtatttcctgactatcctcccaccattggttaggaagctttggcatcagatcagcatataagattccttcggttctgaaacccggaggcgtattcagcaggaaatgaagatgattactaaaatacaacgataagatgatcagtaaaagagtgatactatattgcacaaataagaaaagggtgcgtgttttcactgactgacgtgaagtaccaatcgtacttatagacacgaccggaggcaaataattgtatttaagataaggataaatcgttgtcagcagtggcaacaatataaatattgccaaagagagctgccaatcgaaagctgtatacataacgttgctttccagcaaacgattggcatatcctgaaaacatctctataaagaaccatgcgaaaaataaagcgatgagtaccatcaagacattctctgtccataactgaaaaaaaagtgtacgacctctcatgccaaatactttcctgatgccatactccttggaacgctttagcataaaaaccaaatagatattgacgaaattgagaatacctgccaaaaggagcaacaggcatacacaggacagtacccataaatgaaatcgactgctgtaatgccacatttccggtgcatcggcttttgctgctaatatcttattccaataaagttcactgacaggaataaaatcataacgtatacggtaaccgccatcagcttgacggtaaatattgctaatagcgttaatggcatctacatccactcccggcataaaacggataagttcaaccagcatctttccccatcctctttctccattcttgagttcgaggtttaaaacgatgtcaaatgtcaacgaagatttacatgtcggttcatccaatacaccacagacagtgagaagatgaccaccggaataacttagtttttctccaattggattttcctttccaaatacacgctcggcaaactggcgggtaacaagtacatcattgggagctttcattggtgtaccactgaggggatacgtgaagaaatgaaagaaagcggtatctgccgctaataattgtacggtatacggcttaccatttatggcaacattatcattgctgaaagttacaaaacgggccttttccttcacagcttccggagaatagaaaactgtatctgctccactatatccatctgatacactacctgcaaatacattcccatcaatatcccgaagcggtatatatacattctcagcatctatgcaatgagtatttactcgtgtctcctgatgaatataacgtaccagtatgattgtacacgccagacttaatgacaagccgacaatattaatgactgtatatgatttagagcgcacaaggaaacgccatgcatactttagtgttttcattatattctgttgtttgcagaagaatacttcaaatcctatgccaaaatataaagcgttatatactagcgatttggatttatcagcatatattctatttgtgcatatacgcacaaaaagagtgcgataatgcacggatagaaagacctccggcctattgccgctatagcaatacaaccgaaggccttatttcaatctgaatctctgactacaaacgataggtaacaatcctttcttccggagaatcaatccaaaggcgccatacaccttccgaaaccttctccactgttcccatattggcttttggctgacggcgactctggatggtcagataaccttttccttccgtggctttcactttaatggttttattatccatgtagacatgaatgtctccgttcggagtaggtacggtaccttccatccatttcaaacctcccaataccggactgacagcaaactctttataaccctctttcgttggtttgactcccaaatagtatttacccagcagataaataggacttgctccccaagcgtggcacaagctctttccgtatgggcggccatacatggcaagatgctgtgttccgctttcctccggattatatttctcccaaaaagaggttgctcctgctttcaacattccaccccagtaagctttcatttctttcattacagtctcctgctcaccaagagcacaaaaggcttccagttcgtaaaaacgcatataaggcgttgttattttcagaatctcatcattcaggagaacggactgtttaatggcctgctgcttatccgcattcagataatcaaagaaaacagagaacatattagcgtatcgggttacggcatcactctgacgtccatccacacaattgtgcacaaatgcctgtttctgattattccagaaagtcggctctaattttgcttttaacgcagaagctaacttctcatatttttgttgtccgtccttatctccgactaaatctgcacaaagtgccatcgtctccagactccggcaaaacaaaacctgttcgaaagaaagttctccctttttgtctaaatagccatctgcccagtccacaaatacccagtcgccggacattcctaccaccataccattcttattcgtacgtcccaatacataatccatcattgtttgcatacgtggatatagctggttgacgaaatgccggtcaccgctatacatataatagtcatatacacttaagaaccagtagaaagtgtaatccataatggtgttgctatggctggtcaccggatcttttccacgaagtagccagatggtacgcttcacggactcactgtcaaagaacagataataattcatcagataactttggatggcatcgccactccatacccaacggtcgcgcttgataccgtctataaaaaactcgcgtgtagtaagatgcatcgtgtatgctcccacctcccagatacggttcagttcctcgtcgttacaacggaagttaccacgatattcttcgggaagatattcatattgcatagatacttcaccaatttgtacttccggttcgtgagtgatgtatacatagcggaatgctttgctgttctccagtgtatattcattatcagaatgatgcaaaggagatgtgctgcgaatagcgaggtcagtgatctgtccaggctccagcaggagtttatctaatgtttcgcaatatgctttgtctttcgcctcttccggactttcaccataatagaggtcaatctttcctttgcccgaaagattctttaatgtgataaatccgaaagtttcttttccaaaatcataaagtatgcctccttccggctgttctgttttagcgacaggttgctgaggttcacgcatcaggctgaattgggaaggacgctgagtggcatcgtcaaagttccagcatccggcatccatatagatggtggcagatgtgtcactagccttaccgctttcatcgatccattccttatcttcataagttacccgccaggacgaatcagagtttaccgtctttcctttcacataaatagtgggaggcgttgcctgattccatactttaatattcaggctatgttttcctgccggaagcagcaaggtttcaggcattccgaactgaagtttcccgtccagcttcacattatatgttccctcggcagcaataaacacttcttccggttcggaaagattcaatactttgctgaactctacgactacataatgactgtctgttttccaaaaaggaggaaaaaaagcaccacgttccgtacgtcggttgttcatctggttgcccagccagatttcatagtcccccggataccatatccaagtttgggcaaaggtgctgcttgccaatgacaaggcacccagaagtatcatgcatttctttttcattttttcttatttcttcaagtccctatattcggcttccaatcctgcacgttcacgaatgactgtatctacctgcggaccattgttctcccatacatttccgggaccgttcgcattttgcagatacttctccccttccgtccagttatcgcgtacagtgataaaagaagagccttcgtccgtatagagataaaaccaatgattgggatcgtgtacgtaacctggcttataaatgctatgtacgcaattctcagttacataacttttcggctgcgagcccagtgtataaattccggctacgtcgtacatatgctttgcatagtgatgaatcagatttgcgtgcactctgttgttacgcatacagttcactgtctgcgtccagccccagccaaggctgatgccgctataaggaacttcgcagatttcattgtgttctatattaatatctttcacatagcccgcaaggattgcaagacatccccaatcttcgttacccacttcggtaaagtagcaattactgatttgttgatgcgcgcatacttcccgaaggtcggcagggtcgtaaggcaaatgtgtttcatgggcagccggagagaaactgccgaccaccagtccgttccccgcaatatcacggaaaagacagccacgaacgacaccgccctgcacggcttcttcataatccagcccggttgagcctaaatgctcgaaccgacagcgctcaaagtcgatctgattggcagtagccacgcttacagctgcggcaggacgtcccagccatccttgattatccaagggatgattcagatagtcccgttccattttcgggtcaatacgataaccgtctgtcagatacattcctgcctgaagaggaacatggcctttctcagacggacgcatccaagtcgtatgagagaacgtgattttctcaaaacggatatgtgaaacaggacggtcgatggtcccttttacttgtaccaatgtctctatggccggcactatcacttccgtgccggcatcctgcatcttctctccttcccgaggataataatagaccttacgggcatctatgtcgtgataccattctcccgctacatccaatagttcacgggcattcgtcagataaaaagcagaattatgcccatctgtcgttaccatcggacgcggccagggatgctcaaactgaatccgactctccggctgatgaaaacgtattgcggcactgtctccagccagttcgacagaacgaatacgaagattggccacacaccacatttgatgcaatactatctctgcatatttggccttcaaagccccttttccgtctaccagtctgcgtatggcaaccgcaggaacataaagaatctcattcttttcgtccacactgcaaatgcggttcatcttctcaaaatcctctacatcacgggcacggacagctttcttcccattcacccataactgacggaaatccaatggccgcccgttgaacatgggcacatccgctacccaaagttttccctgcttcttccatccaccgatccggatgccgccactcaataccactttttcatcagctaccggacggatcaccgtgggagaatcctccgtcccgctgtcttccggacgaataaacaccggttcatagagtgcatatgtaccgccttccatgcagatcgtaattcctccccgcccccgttcatcatctgtccggcgccattcgcgtgcctgacgcaaagcagaagtcaacgtcgctttcggagatggacgtgtgccgtcattgaaatcattcccctgcggcgaaatccaaatttcgcctgctgacagcagatgtgcacccaacaggcatatagttgttactaataactttttcatttttcttttgtacaatgggttatcttgcaagcggcatccagactgtcatctctcctttacctctgtttccccatgcataataaggaatcagacgaatatccactgttttctctgcttgggcaaccggacgataaagcacgccttcccaagactcagacgatgccagacgtgctttcccttccagggctactatcgaactgccttcaatcgtcgttttcttcggagtcagctttatgtcggcaggaatcaagatgttatcgatcttttctccatttgcaatgtccatactctccagacagtaaaccaacgggccacgtttcactaccacctggttacggatttcttctgccaacggatgggcttcgagcagacaaacaggcatatccatgaccagttctaccacatctcctttcttccatgtacggttcacttccgcataggtatttgccttggcattcatggacaccggttgaccgttcactatcaacgcagctttcccacaccattcgggaatacggaagaagagggagaaagcacctgctttacggggcactttgtccagcgttacacgtatattaccttcccaaggatagtccgtttcctgcaccaaagcaagttcccccttatctttccagtttgtagtcaatgtatttgcaccgtacaggttgcaataaatcccttccggactcaatgtataagcataattctgcgcctgacaaagcgtacgcaatgtattgggcggacaacagaaacaactgatatattccgtccgttctttcggccaacggagtgtataaggcagatcggcactgatacgaagaggattcgtatagaaatacttctttccatccaggcttatgccactcaatacactattataaaggcaagtttccacaagctccgcatacttggcatctcccgtcacttccagcatgcgccagttgaacagcatattaccaatgttggcacaagtttcgttatgtgccgtactgttcggcaactgatacggacgaccgtagctctgatgcactttctgaatgctatccggttcatagcacgttccatccggtgaggtgccgtcatacaaagcaccgcaagctccggtcacgtacatctttcgggtgacaatatcgttccagatactagtcagattcttcatcagttgttgttcccccgtctccgcatacacatctgccacgcctgcatacaggtaattggcacgtacggcatgtcccattgcacgatattggtcacggaaagggatacggtcctgattatcatccgtgccgctttctaccataccgcgaatgtcaatcaggttttttgaaagttccagataacggggatttcctgtagcacgatacatctccaccactcccatatagtgtgaagggcaaattgcattgcgcgccaactcggcggaagctgtttcatagaagtgacaaaggaaatccgtagctttcacggcagcatcaaaaagagttgtttttccggtagcacggtggtgaacgatacctgccatcatcaggtgtcccaagttatacgtttcaaaattcaaccgattggcaaatgcacctttttcgtcctcagagcctactttcgtaccaatcactgtctgttgttgggagtcagcctgcgtatggctgtctattcccttattcagctcttctataacaaccggtgtatgtatataaccatctgcacgctgggcttttacgacacaagcaataaagttgtccattaacttgtccagttccggatctttattgacagcatacacagaagcgactccttccatccacttgtacatatctccatcgtggaacggaggtccccaatgttctcccttgcatacaccggcagcaatctcaaaattacggaaaccatgagaaacttccggcgtgttccatgtattccacatactctgcaaggaagttccgctaaatacattaaaacgctctccccagaatccattcgtccagtgtacggcatctattccggtatttgccatttttgcataacggctctgactcatatccgtcagcccattgctttgcgcaaatgctcccgtgacggaggcggaagctaaaagaaataacagctttatctgtttcatttaatatggatattttttaaatttacacactatctctttaaggagagacgtgattatccatattttgtactcaataaaggaatgcgaaagctgtccgacagccttcgcattcctttattcctatttgttctttcgttatttttcgggagtataattcagttccgctttcctcgcctgtgagtgctggaactgtcgggcgactttatactcatgtccgtctttcaacagataacttcctgtctgcttgaaccagaaactgacatgagcttccacacattgacggcggatgtccaacacccagtcataattgcaaacgcgggcttccttaccggactctcctcctgccactacctgctctacccatccttccaattctcctctgaaatcaatctgactaagaagaggttcacagataataattttatgtttaataggactttctttataaataggtaagcgataatcgactctgtcctgattctccattgtacaacaaatcgtcacattgttgtatccatctccccaatccggtggcaggcactgttgcagcctttctatccgcttagttataaacataaaatgaaggtcctgccgtatccgcatcatttcccatgcttcggcacgccattcatccgcatcttcaatcagaaaatcagaggtaaaacaggtatataccagatttcccgagggtatcttatattctccattttttttcttctgtaaaggcaaaccgaacttttccgtctttgtcaccaccgaactgtcttttccatatttgccatccgtacgatatacatagcagtggcggcagccttcactccatttgtgacagccgtgccataagttccacattgatgctttcccgcccatcttcttttttttcttcaaatgtatgctttatctgtttcataggcaaattttcattcaatatccgctagtcagggtagatagatataaatagtgcatcttctttctcgcttgaaaaaagatgcaccaaacacaaacaaaacaaacaatagagctaccttcacaggcggccggtccgaaaggaccaatacttttgatagtgaaatctcacttcacaaatatccgtatatttggggactagccaaactccatccatgtcggatacaaacaataaatgtttcgaaggtgactaatactatgacacaaaggatgaaatgttgcggaatataaaaaacaaggccagacaagaagattcttttgtactatttgtataatcaggaaaaaataaatttcatttattaaaaaacgattaaatcacgtcggtaagcatcattcatccctttactccggcggattatgtcaattaaaacggagatatgccaagcatatctccgcacatctgatcatctaataggattcactttaatattaattgttatctggttaaagcaaccatcgtccaatattccttttctccgcgctgaactccactcctactttcacgacttcacgtccgtctgtctgataaggaatcagatagcctttttcatcaatctgctgcaaagcctgctcggcagtcccattcagtttgaattcgaatacatatatatatttaggcgtttttactactgcgtccgtgccatcaaatcttacgataaacttcctcaaacggtaccctgcaccgttctccccaaattcctttatttccattccggattccacaagaaactaccatatttatttcagcaccatgaggcaacttaagcaaccttttgagtcgtcggctatccaagccttccaaggggcaggtatcatatccttcgttcgccatagcaatcataaatgtctgagcagcaagtgcacaggatttatgtaccaccacacgcacatcaccttcagatacttcgagcatcatagggcggaaaatgctgataatattagcaagtagtactctgaaaagtcctaagataccgcagaaacgggcataaacaaacggcatcaatatcccatagtacagttttctgtctttaatacgtttctcctgcctgtctataggactattccgccgtatatttcctgtctcgaaatcaagaacaaatttcgcccgcttccgatacaagtcacgacgtgtgacgaaaacaacaatctgcgaagccgtggaagttgctttttgatcaagacaagctcttgatacctttgccatcaattcaggctgtgtgatgtgataaaactcccatagttgcatatcagaactattgggagccaaagttgccaattccaggcaatgctttactttctctgtatctatttccttttctttatcatatacccgtacagagcgacgatagtttaaaacttcatctaaattcatatactacttgacttaattgaataatatttcataatgtgcaatatcagaaaatacagataagcccatataaataaaacagatctgcaagttaattgtatcttggctaactatatttttaacatatagtcattgtatatacttcaataagagatctatgaatgtctaaataaaagcgggcaaatatgtgataaataacatatttgcccgctttctataaaaaataagattcgtatcttacttaccggtaattgaatttttcttcccctgcttatttacaactgaaggacttcctttatattcaatatcaccgctaccactaactcttgcatccaactgtctggaagcgtagcatactatatcacccgaaccggcaactgtagcaacgacattagttgcagccagtttttcagcactaatatctccggaaccatttactgtcagtgtcgccttctgtgcagaacctttcatattgatatcaccggaaccattaacttctgacatcacagtagtcgctttcacatttttcaaatcaatgtccccgcttccttttaccaaagcaaatatattagcatattgcagattctccgcttcgatatctccggaaccggctatattcaaattcaagtcattccctttgattgtacctttcagatatacatctgccgaacctttaatatctacctgattcaatgaaggggaagaagctatcactttcaaacgacgctctccactaagaatcttgacaccttttttgatattcacctgcaatactccatttactgtagaaacttccaacaagtctaccaaattatccgaaccgtatatagaaactgtcgttttagaaccattactctgacgatactcaacatcaggactgcctaatactctgattgaactgaagttgcttacgttattcagttcttttgtgatatatttcttactgggagtaacggtctgcgcctgtattcctgtgaccaacaaaaacatcagcactaccaacatagatgtaacctttgaatttctcataatttcttttcattaaatattctaatgacaaatataggaagtatatttcgaattacaagaaaagaattacaattttgccaaccattctccaagctcctgaagccactcttgcttatacacaaaactatcattataaccgaatccatgtcctcccgcaggatagatgtgcagagaaatggggatatctgctttctgtagtctggcagcatacataataccattcagagggcttaccacagcatcatctgcagctgctacaatgaaagcggcaggtgtaccgcaagtaatatgctcaatcggtgaatactgctccattttatccggtgaataggaatgaccaaacattcgttcacgacaaggaaaatgtgtcaaacgatcatcgacactgactaccggatacatcaatatctgaaaatccggcttctcatcatcaggtaaaagcgtagctgaaaaagttgccagatatcctccgatagaagcccccatcactcccagtttatcacaaaactctggaaacttttctcgcacaaccttcaatgccaaccggatatcttgttcgggaacatcaggattaccacgaggcattctatatttaaagacgatatatgtaattcccagcttcgtaaaccattcggcaaaatcaatgccttcattctccagattagtcttcagaaatccacctccgggacacataataacactgcttccattgggcctgtcacaagtaaaaacaaataaagttccttcggaagcattttctacgattccaatcagttcgacattgtccacttccgacaaatcataggtcgtcatggataagtcctcatacaagctaatacaaattaatttcttcatatcgattaatgtttaagtttcttccctattttatgaacaacagacggaccagaatagataaatgccgaataaatctgtatcatatcggccccttgggaaatcatatcagctgcatcctctgctgtcattattcctcctgccccgataatcagaaagtggtggtcggtgtgcccggacagataacgcactaccttctgcgatttctttccgataccccgaccactgacgccaccgttaccgatcttttccaactgttttgtttttgtatgatgcaattctgagcggtccatcgtcggccccgtagctataaagccttctatggaatatttatatgcaagggaaatgaccagatccaatgccttctcatcgatatccgccgggagcttaatgaaaatactgcaccgtttgttcactgcctgacgaaatgttgtgaggttttctaaaactttagcaaatgattctttatctatactaccccagttcagcgtaaaataatctacactttcatataagcgagtgaaaaccaactcaaaatctttgatgatttgctcaccggcagaaagcggattcttattgatatttactccgagcctgtaagaatgttttctgtattttctgatatgctccagagctacatcgacaccgcaattattgaaccctgtacgtgagatcagtgattcgtcttctaccagtctgaagatacggggagaaggatttcccggctgataatcaggagttacagtccccacttccagaaatccgaaaccaaaatctgccaactcatcaaatgtttccgcatttttatcgaatccggcagacaagcctatccggtttttgaatcgcaggcttccgtatgaaaaaggttcgtccacttgatagtgtcctcttacgcaggcacgaaccggaagcagataacgatagatttttaaccagttcaagagcattcgatgtactttttcaggatcaatgagaaataataacggtctaacgattaaattatacattttcaattatctgttttttagattaaagaaataaatccacactcaggaaataacttcttcctagtgctcttacgtatgcaaagtaagacctttttgagcagatattgaagttcattttttttatacccgataacttttgattatccctgcttcttattgtctgtatattgggtacaaaattcctttttaatcgtcctcctataaaagtataaaagcgattagatgaaaatgaataaaaagagattaatcggatatctgtttgtaatggtctctgcaggatgtattcatgcgcaggagaaaaaagtatctgcacaggaatataagctatggtatgaccgtcccgcacaggtatggaccgaagctttacccttgggaaacgggcgtctgggggcaatggtatatggaacgccgggaatagaacaaatacaactaaacgaagaaaccatttgggcaggacgccccaacaacaacgcaaacccgaacgcactggagtatattccgaaggtacgtgaacttatttttgccggaaaatatctggaagcacaaacgctcgctacggagaaagtgatggcaaaaacaaattcgggaatgccttatcagagtttcggcgacctgagaattgccttccccggacatacccgctattccgattattatcgggaactgagtctggactcggcacgtgccatcgtccgttatgaagtagacggagtgcaatatcaacgtgaaacgatcacctcatttaccgatcaggtagttatggtacgactgactgccaaccgtccgggacaaattaccttcaacgcacagctcacctcccctcatcaggatgcaatgattaactctgaagaaggaaactgcgtaaccctttcaggggtgtcttccttgcatgaaggactgaagggaaaagtagaatttcagggaaggctgaccgcccgcaaccaaggaggaaaaatagcttgtaccgatggcgtcctctctgtagaaggagctgacgaagccacaatctatgtgtctatagccaccaacttcaataattatctggacatcacaggcaatcagacagaacgtgcaaagagctatttgtcggaagcgctggttcatccattcgcagaagccaaaaagaatcacgtcgaattttatcgtcaatatctgaccagagtatctctggatttaggggaagaccaatataaaaatgtgacaaccgacaagcgtgtagagaattttaaggacacacatgacgcgcatctggttgccacttacttccagtttggccgttatctgttaatctgttcgtcacaaccgggtggacaacccgctaacttacagggtatctggaatgacaaacttttcccttcctgggatagcaaatatacctgtaatatcaatctggaaatgaattattggccatcggaagtgactaatttaagcgacttgaacgagccacttttccggctgataaaagaggtgagcgaaagcggaaaggaaacggcaagaatcatgtatggagccaacggatgggtattacatcataacacggatatatggcgtatcacaggagcactggacaaagccccttcgggtatgtggccgagcggcggtgcatggttgtgccgtcatctatgggaacgatatctgtacaccggagacacagagttcctgcgttccgtttatccgatattgaaaggatccggactgttctttgacgagattatggtaaaagaacctgtacacaactggctggtagtctgcccgagcaactcacccgaaaatgtacattccggcaacgacggcaaggcaactacagccgccggatgcacgatggacaatcagttgatattcgacctttggacagctattatttcagcctcccgaattttggatacggacaaagaatttgccgctcatctggaacaacgcctcaaggaaatggctcctatgcaggtaggacattggggacaattgcaggaatggatgttcgactgggatgatccgaacgatgtacaccgccacgtatcccatctatatggattattccccagcaaccagatttccccttaccgtactccggaactatttgacgctgcacgcacttctctgattcatcgtggagatccgtccaccggatggagcatgggatggaaggtttgcctgtgggcacgcctccttgatggtgaccatgcctacaaactgataaccgaccaattgactttggtacgtaacgaaaagaaaaaaggaggcacctaccctaacctattcgatgctcacccacctttccaaatcgacggaaacttcggttgtgctgcaggtatagccgaaatgctgatgcaaagttacgatggctttatttacctgcttccggcacttccgactctctggaaggacggttctgtcacaggtatcattgcccgtggaggtttcgaacttgatttaagctggaagaatggaaaagtaaatcgcctggtcgtgaaatctcataaaggtggtaactgccgtctacgttcactcaacccgctgaccggaaagggcttgaaacgtgccaaaggagagaacccgaaccctctctatgcagtccccacgattccccagccattggtgaatgaaaaagccagcctgaataaagtggaaattgcaaggacttacttgtatgacctgcctaccaaagcagggcaagaatatatattgattggaaaataataactctacctatatgaacagaaacttgttaaaactgattgttgcttgcggagctgtctgcttcatcgcctgcacagcacctcagaaagcagaaacagaaaaatggagcgaacgtatggcatgctctgagatgaaacgttttcccgaaccctggatgattgaaaaagcaaaagtaccccgttggggatatacccacggacttgttgtaaagtctatgctggaagaatggaaacataccggagacagcacttactatgaatatgccaaaatctatgcagacagtctgatcgatacggacggccatattaaaacgatgaaatatctttcattcaacattgataacgtcaatggcggcaagattctttttgatctttatgcacaatcaggagatgaacgctataaaatagctatggataccctacgtaaacagatggcagaacaaccccgcacaagtgaaggaggattctggcataagctaagatatcctcatcagatgtggctggatggcatcttcatggcttctccttacttggtacagtatggcagtactttccaggaaccggcactatacgatgaagcagtgaaacagattcttctgatagcacgcaaaacttacgaccccaccacagggctttactatcacggatgggatgaaagccgtgagcagaaatgggcaaatcccgaaaccggttgttctcctaacttctggagccgcagtattggatggtatggagcagccttggtagacgtactggattatctacctcaggaaacgaccggacgagacagtgtaatgcagattctccagagattggcaaaaactttagtgaaatatcaggatcctcagtcaggcacctggtatcaggtaacagatcaaggagcgcgtgaaggaaattacctggaatcttcggcaaccgccttatttatctatacacttgctaaagctgtcaataagggatatatcggcaaggagtacatccaacctacccgcaaagcttttgatggaatggtcaagacatttacccgtcttgaagaagacggcagctataccattacgaattgttgtgcggtagccggactgggcggagactccaaaagataccgtgacggttcattcgaatattatatcagcgaaccggttatagagaatgacccgaaatcagtaggatcgtttattctggcggccatcgaatatgagaaaatgacagacaaataaatgtaaagatatgaactccaaaaacgataaagtacaatgagaaaatttaagattcttcctctcttattgctgctgttgacattggcaacctctgccgcagcacaaaagaaaacacaaaagacgtatatcccatggagcaacggcaaactcgtcgtttctgaagaaggacgttatctgaaacacgaaaacggcactcctttcttctggctgggagaaaccggctggctgctgcctgaacgtctgaatcgtgacgaagccgaatattatctggaacaatgcaaacgccgcggatataacgtgattcaggttcagacattgaataatgtcccgtctatgaatatctacggacagtattcaatgactgacggctacaacttcaagaatatcaatcagaaaggtgtatatggttattgggatcatatggattacattatccgtaccgcagcaaagaaaggtctttatatcggcatggtctgcatctggggaagtccggtaagtcatggcgaaatgaatgtagatcaggcaaaagcatacggcaagttcctggcagaacgctataaagacgaacctaacattatctggtttatcggtggggatatccgtggtgatgtgaagactgccgaatgggaagcattggcaacctccatcaaagcaatcgacaagaaccatctgatgacattccacccgcgtggcagaacgacttctgccacttggttcaacaatgcaccgtggctggatttcaatatgttccagagcggacaccgccgttatggacaacgtttcggtgacggagattatcccatcgaagaaaatacggaagaagacaactggcgttttgtagaacgcagtatggctatgaaaccgatgaagcccgttatagacggtgaacccatctacgaagaaataccacacggtctgcacgatgagaacgaattactttggaaagattatgatgtacgccggtacgcttactggtctgtatttgccggttctttcggacatacgtatggtcataactccatcatgcaatttatcaaaccgagcgtaggcggtgtttatggtgctaaaaagccctggtatgatgctctgaatgatcccggatacaatcaaatgaaatatctgaagaacctgatgctgactttcccatttttcgaacgagtaccagatcagtctgtcatcaccggacagaatggcgaacgttatgaccgtgccatcgcaacacgcggcaatgactatctgatggtatataactataccggacgtccgatggaagttgatttcagcaaaatcagcggtgccaagaagaacgcatggtggtacactaccaaggatggtaaactggaatatatcggtgaatttgacaacggtgtgcacaagttccagcacgatagcggctacagcagcggaaacgatcatatcctgattgtagtagacagtagtaaggactatgtgaagaaagactggacagaactgccggaccagcaaggtgccggagcctagtttccattcactctatcaaattgacactcatgaataaaaagatacttatattatcattcttatctgttctgtttcttgcagcaggtccgatacgtgcagccataggtgtaaccaatctgcggacagagcagctaaagaatccgtcgggtatcgtcgatacgcaccaaccccgtctgggttggcgtatcgagtcgaacgaacagaatgtgatgcaaaccgcgtatcacattcttgttgcatcttcccccgatctattggcacaagggaaaggagatatgtgggattccggaaaagtagaaacagatgcttcccaatggataacctaccagggagaaaatttgaaacgcaatgctccctacttctggaaggtgaaggtttacaccaataaaggtgaaagtgattggagtagtccggctttctggagcatgggactattcaatgaagcagactggcaaggtcagtggatcggtctggaccgtgcagctccgggggacagtgaaactcaatggagccgcctggcagcccgttatcttcgcaaggaatttgccttgaagaaagaaataaagcgtgccacagtgcacatcgccggaatgggattgtacgaactgttcatcaacggacaacgcataggtgatcaggtactggcccccgctcctaccgattaccggaagacaatcttgtataacacatacgatgtcacttcccaacttcagcaagagaacgccatcggtgttactttaggcaatggtcgtttttataccatgcgtcagaattacaaaccatacaagattccgaccttcggatatcccaaactacgcctgaatctgatcgttgaatatgctgatggcagtaaggagacaatcgcgacgaatacttcatggaaactgacaaccgaaggtcctgtccgcagcaataacgaatatgacggcgaagaatatgacgcccgcaaagaactgggaaactggacgcagacaggttatgacgatacaaaatggatgccggcagaacgcgtcagtattccttcgggtacacttcgtgctcaaatgatgccggggatgaaagtaacggaaacgctgaaacctgtttctatccaaaaaatgggtgacaaatacattatggataccggtcagaatctggcaggatgggtacgtttccgtatcaaaggtcaggcaggcgacagcattcgtcttcattttgcagagcgtctggaatcagatggagaaatcttcacgaaaaatctgcgcgacgcacattgcaccgatatatatgtagttagcggacgtgaaccgcaaggtgccacctgggctccccgttttgtgtatcatggtttccgttatgtggaaatcagcggatatccggatgccaaaaccgaggatttcgtagtggaagtcgtagaagatgagatggatcatacaggctctttttcctgttcgaacgaaacattgaaccaagttatacgtaatgcattctgggggattcggagtaactataaaggtatgccggtagactgtccccaacgtaacgaacgtcagccctggctgggagatcatgcaatgggctgttggggggaaagtatgtttttcgacaatcatgccatgtacaacaaatgggcacgtgatatccgcgaagcacagcgcgaagacggctgtattcctgatgtagctccggcttactggaactattattcggataatgtcacatggcctgctaccctgcccctagtctgtgatatgctcttcaccaattatggagacatacgtccgatagaagataattatccggctatcaagaaatgggtatcgcacatccgtgagtattatatgacaaaagactacatcatcaccaaagataaatatggagactggtgcgttccacctgaatcgttggaaatgattcacagtcaagatcctgcccgcaaaacagatggtgccttgatcgctaccgcctattacctgaaagtgttacaactgatgcatcgcttcgccagtcttcagggattgactacggatgccaaagagtgggaagacctggaacataaaatgaaggatgcattcaatgcacatttcctgcatataaaggaaggtacttcacttgtacccggtcatactttatatccggatagtgttttctacgggaataatactgtaacagctaatattctgccacttgccttcggtctcgtgcccaaagcacatatcaaagaagtagcaaaaaatgcggtaaccaccattattacaacgaacaaagggcatatcagtaccggagtaatcggtacgcaatggctgatgcgtgaattgagtcgtcggggccatgcagatatagcttatctgttggctaccaatgatacatatccttcgtgggggtatatggcggtacaaggtgccaccactatttgggaactttggaacggtgacacggcaaatcccggaatgaacagcggaaaccatgttatgttattaggagacttacttccctggtgtttcaacaatctggcaggtatccgtgccgaccgttggaaatccggttacaaacatattgttttccagcctgctttcgaaattcaggaattgagtaacgtggatgcttcttatatgagtatctacggaaagattaccagccgatggaaaaagactcctatgcatctggaatgggatatcgaacttcctgccaatactacaggagaagtgcatctgccggatggacgaaaagaaaaaataggttccggaaaatatcatttcagcgtagatataccgacacggaatgctgccatcatcagcgatgaatttctatatgagaaagcttctttcccggaatgccacggggcaaccattgtagaactgaaaaacggtgacctcgttgcttctttcttcggtggaaccaaagaacgtaatccggattgctgcatctgggtttgccgcaagcccaaaggtgccaaagaatggacggctcccaagctggctgccgacggagttttttcactcaaagattcgcaggctgctttagccggcatagattcgacctgcactcctatagtggatgccaaaggaaaactgactgcccgccggaaagcttgctggaatcctgtactttttcagataccgggaggagatttaattctgttctacaaaataggactaaatgtaggcgactggaccggctggctggttcgttcaaaagacggtgggaaaacttggagcaaacgtgaagccttgccggaaggatttctaggtcctatcaagaacaaaccggaatacatcaacggtcgcatcatctgcccgtcaagcagagagggcaaagggggatggcgcattcattttgaatattcggatgataaaggcaaaacctggaaaacgacagagtcggtacctgccgaactgtctgtcccgactcagaaccgtaaaaaaggtggtattaacgtagatgatcaggaagcgggagaagctattcagggagaaggggcacaaccgattcttgccatccaacccagtatcctaaagcataaggatggaagattgcaggtactttgccgtacacgcaatgcaaagattgcaacatcatggagcagtgacaatggtgaaacatggagtaaagtgacattaagcaatgttccgaacaacaattccggaacagatgctgtgacaatgagtgacggacgtcacattctcatttacaatcatttctccacattgccaggcacaccaaaaggtccccgtactcctctctgcgtagccatatcagaagatggaatcaactggaaaccgattctgacattagaagacagccctatcagccaatattcttatccaagcattattcagggaaaagatggaaagttacatgcaatctatacctggcgtcgccaacggatcaagtatacggagatagatctctcaaagtttaagtagtagctgaataaaagaaaaacagattctctgttatcattataccgcactgacaattatcgtatcagtgcggtatttcaatcaaaaagcaagacacgcacggacgcaatgtttactgttcttataatcccaatccatggcgccgacgtaggtgtcggcatagtatgcgttgagaaacggatcgtagtcgtcctccgaactcgaccaataccccaatttccacccatagtcattatccccggtagctttattgacagcggataaaagataagctttattgtacatccaataccagcattgacctagcgagggtaaaaaccaaccactgctgtttgcaggagcgggatggctatactcataatccgttacccaatagacagggggaaatccattctttaaagttcgattctcgttttccgcaaacgagatgatcccctgtgtattcttatagccatagaaaccggtgctcggctcacctctgtttatatcagttaggctccaaagcccccatgtacaagcatttcctccattggcatcataaagcgcaagaacgtaaccatgtacggtatgcatctctgttataccatatttctgtttatatttacagtagtctacccattcgccttcactgtctttacctgacttcaaaacgatacccaagcagttcatatctgcggaaagagcagtaacatcaccgggaatcaaatagccgttattactttcatccttgcaataaaaatcgcccatttgagctttatccaatgtataatcacctatatcttttaaaaccggagtgaatgtataacaggtattagcagataaatctgtatcaggcatcgcaccactatacatctctttgttatattcataaagccaacgaacctttgcccttttcggagaaataattatttggtaactgccatcattcatttggtaagggaaaagaggctctgttccgacattgaaactcacatcactaatcgaagaaggaacataagtaaagtctctccttccattaattttgcattttatggaaggagacaacgaaagtaaggaataagcatgttcaaatactatatccaatttctttaacggtctaccactcgtgtcactccataccaacaaatcggaagcacggtaggcatccttgctgcgttggtcaccctgcggtaagaatttaccttttagatcatctatgttaatcacgttatccgcttccttactatacggaaagtaggcaaggtaaacggtggctttattgtcgtagtaaatggttgtttttccttcatcgttattgctgtcgaagctccaaatgttaccatcatatcgataaggtatgttgtcggatagtacattattatctgcatccagcacaatgatgccgatacgatcaccattttcgaaagtacccgtacttccgctatccgtagcacgaatactggaaacatcgttgatagcaaagtcaccaacacgaacgttcagttgcaatacttcaccgtcttgctgcaccatacccaaatctattttttcatcaccattgcaagccatgaaggataataacgagagcaacaacaaatacttcaaattctttttcatactcatttttctatatattattaaaaagtcaagatgacacggatagaattcttatccgatacgctctttgcatggtcattataaagagcatttcctactaatatgaaattcctctcgatactaaaaagctagaactgtttttaagacgtttaccattattcatagccactaatggtttaacatttttcaacactatatacaagtaaaagcccaaagacttatattttaattacttgtcaatagaaatctttggataatatttataaaaggaacagattattataaggtgtatttcctcagaaatccggcgttataaaatcatcaaactcatgaccaatgataatgatgatattaatcttatagattatttggagattacttattcaaaatataccccctaagcaaggatattattatagttagtttttagggttaaaactgctggggtttcaaacaaaatactgattttcaatagtcatcataatggcttctgactaattttgccttttcgaataaatatagtatttttgttcctcagatttaaaaatgaagaattcatggcagataattatatagaaagacaacaagagcaatacgaggccagaaaagcagcttggaaacaggcacagaaatatgggaaaaagaaaacggctaccagcagtcaagtcaaaacggaggtagcaggtgaaattgtttcaaaaccggacagcctgaaaaaaagagtattcgtgacaggcggagcggaaggcatagggagagcaatagtagaagcattctgtaaagacagacatcaagtagccttctgtgacattaatgctgtgtccggtcaacaaacggcaagagataccggagccatatttcatcctgttgacgttagtgataaagaagcacttgaaagctgtatgcaacagatattggatgaatggaaggacattgacatcctcatcaacaatgtcggtatcagtaaattttcttccattacagaaacaagtgtcgaagatttcgacaagattctttctgtcaatcttcgtcctgtatttattacttcacggttatttgccattcatcgtaagggacagtctgattctaatccttatggaagaatcattaatatctgctcaacacgttatttgatgagtgaaccgggaagtgaaggttatgcagcttccaaaggtggtatctattctctgactcatgcattagctttatcattatccgaatggaatatcacagtaaactccattgctccaggatggatacaaacacaagattatgatcaactccgaccggaagaccattctcagcacccttcccgacgagtgggcaaaccggaagatattgcccgtatgtgtttatttctctgccgggatgagaatgattttatcaatggtgagaatataaccattgacggaggtatgacgaaaaagatgatttatacagaataaagttctgtattcaacgcatcccgtgtaatctctattcccgtctccacaatagaagctgcatgatggaactccagcatatcataagcattgccggacatctgaattaagatatccggctgacaacgttctatttgataacgggtaatttgctgcatcatcattcttgaagattctgtcaacaagttataaggactcattttctttttcttaccgcaatcaatcggagcattgacatcgactgctatcagaatatcctcttccgtacgatgcacctgattcagcggaaggggattcagtattcctccgtcaatcagaaccataccatctttccgtaaaggccggaagagcatcggtatagaaatagtagcacggatagcatcatacaaattaccactatcgaacctcacttcctgatcgcaaacaatatcagtagccattgctacgtacggtataggcaattcttcaatattcataacgggaataatctgcttcagttctttgataaaacgatcccccttcaccaagccgtcccgacttaatgtcagatccgccagttcccacatcttacgtttatcccagctatagagccattctttacattcctccagctttcccgaagcatacattgcgcctaccatcgctcccatcgagcttccggcaatagaagttatctcgaaattatgacgtaacaattcttcaatgactccaatatgcgcaataccacgtgcgccacccatagaaaggactaatgctactttttgcttatccatataatatacgtttttattagctgtccacaatataacacattttccgcaataaaagatgtccgaccagctctattattctagaagcaaatgaagcaaaaagcagcaatcctctctatgtcagagatattgctgcttatagtatgcattaataaaaaagtatctttgaggctctatttcccttcctttgctttttccgcctttcgcttttctgcatagtctttatacatttggcgccagttacggccatgctcatagaaatacagttcgatcttcgttttataagctttaaagatagcagatatctgtttcatgcttttgtaatcaacagcttgttcgcgagccagtttcagctgttcaagtataaaggctgtttcttcctccgtcatatcaggaacaatctcctgataccctttcatggtaaatgctaccttgccaactgtatatttatctaaaatctgctcaacttgttcttccgtcagtactctgcacaaccctttcatcagtctttcatgaacctccttgggcatagctgagtctgctattatctcacgttcgagctgagttaacggtttgcccgttgtaggattgatacccgcaggtattgtcgtatatggatgatcattatgccagtctcgaacctggcgaagatgattataaatagtcgtcaccgcaaaacctgatttcttttcatcatccagattgagtgaagctacccattccattgctttcttttcaagagaagcatccgatttcaatttggcaaaagccttcttatcaaaataagcagccaccttgtcgaacgaatgaattgcattttccggtagtaactcccctttctctccaaaactgtacatggcagactccggttcgatagttactttactctcatccaacatctttttatctaaatcgaagacttcggcaaagaaatcatagactgcatttcttttattcggaccgaaatcatgtttttctttgggaagatgaacgttcgtcacgttgtctttcgcatcatagaatccatagatacgctgcaaatacggaaattcaagtgcaggaacacttgctgtccagtccccgccatcagaaaccactaattgcggacggggagcgaatgttgcagccagttcggcattacaagtacctcctgccgatagctgaataggcataccgctttcacaaggacaaccaccatcgaaatgagaagccagactaaccaccggggcagaagcagtaaaacggtcatccaacgttgtcagtagtacagtatgcgttccaccaccggaaccaccgttggcaccaatacgcttggtatcgatatctttacgggaagcaagcatataatcgagaatcaacaatccattcattgcctgaatagtatgtgccgcactactacgatgcgccgcacttcccacctggagaattgattctccccagccaaacaaatcataatcgacacaaacagctcccatacgagctaatgtgcccatacgctgctgctgatcttcccgataacgaccgccaccaaaatgtccgttcggacaaataatcagagcgtgtttccctttcgattgaggcgtataaacagccccgcaaacatacagtcccggtagagtttcaagtgcgaaattctgcacagtatagccatcaaacttccgtattttcgatagaatgggggttgagtttacacattgggccaataaagtatcgatccccaaacgttgacggacctcttttctcagtgaatcggcacgaagttcaaaagcctgcttatccgcataaagcgtattgagataagccagcattttttctccgtcagcatctgtacgacgaggatattcataagccttcaacttatatagattaccgctctgtctgacaaatttgtaatcgaatggtgacaacacattcgtcaaagattcttctacagaataagggcggatacggaaatcagcataaggtaaaatctttcctaccgtatcaatatcatatttcagacggattccgaaacgattttgaatatctgccaatacttcattcaagggacgggcaaattccgtctcgtatgtctgcgtctgtgcttctgccgaaagagatgcagcgagaagcaatgagaaaaggattcgtttcattttcttatatttataaatatgtaacctcccaagaggtttatttcagttttatttcttcaccgttaatgattacgttatccatagtgatacgttcacaatcttcaaagatacacttctgtctggctccctgaatatggatgtcacgcaatacaatgtcaaaaatcggagcttcttccagtcctactattttaatcggagtctttacatccgtcacagtcataccgctgatatgaacattacgaaatatcggagtacgctcactctttgcttctgcaggcatttggctgtatttcagattcaagacgacagcctcctgcttgatgttactcattacgatattgctgacacggatatcctctacgactcctccccttccacgggttgacttgatgcggataccacggtcggttccgtcaaatacacagttagagatcgtgaccttacgtacactgccactcatttcactgccgatcactaccccaccatgaccggcaagcatcgtacaattggtaatagtaatattctcacacggcactcccaagcggcgggcttgtgcgtctcttccggatttaatcgtaatgcagtcatcgcctacagaaatatggcaatcactgatatgtacattccggcaggattcaggattgattccatccgtgttgggagaagggacattatttattgtgatccctttgatggtcacattatcacaaaactccggattaacagtccagaaaggagaattgacaattttcactccttcaatcttcaccttcttgcaacgaacaggctgaatgaacggagggcggaaaaaacgacgctgcaaagtgctgacataatctttattcgtctctgcatagatggcagtcgtatcattctgagcatcccacatcggctgatatttattaatatcacgcataccattatcttttaggtcaatcattacacgaaagaactccatccaccacttcttaccttgaccatccagtgtaccttctcccttaatagtaatattttccgcatcaaccgcatagattaacggctggaaacttttcatcatgactccttcgtgacgtacttctacaaaaggaagataatcatcaaagttgtctgaaaaaagcagggtagctccggcttccagttccagtgtaatgttacttttcagatggatacttcccgtcagatacgttccggcaggaaaaaagagcgtacctccgcctccacgattcaaacggtcaatcgttgaatttatcagctttgtattgagagctttcccatttgcttttgcacccgctttcaacatatcaacgcgttcggcacgaaggatcgctgttgcgcaaaggcaaagaaaagccaaaagagtgattcgtaaattcatattctatattattaaatagttcttcttttttatatcttattcggcagcaacaaacttatatgtcccgctttgtacttctttcggttctttttcacccggaagataaacgatagcagtggtattcaccggtacagatacattcagagtaaaagtaccgctctgacgagtccagtctaccagaatcgtaccgtaaagagtctcataagttgatttaacgtatttcaagtctcctaccggcttcggagcaatgacaaatttctgataaccttgcattggctcatccttttcatttacagaagctgataatgttgtagacggacgaataccaatcaatgaattaaagaaccattcatcaatctgtcccatcatgaaatgattccatgaagaaccctgacgcgggtcccactgctccgtcaatgtagttgcaccaaacttcaactggaagccatatccgggagcttcttcatgattgaacatcttataaataagctcatgctgtccattacgtgccaatgtctgaatcagatagcggtttcccacatctcccgtggtcaaacgattgccgtgcgattccacatctttaatcagattcgtcaacactttggcagccagacttgcatccggcgtgtaatctcctttatctcctgtactttgaatcatctgaaggaagatgggaagtgcattactagcttgactccctgtaccatattgtgctgtattactatccaggaaccgtttgttaaacgctaccattatatcgtatgccaatgaactgtaataacgaacgtcaaattcattacctaccattcgggcagcctttatcagatacataacagtcatataataatgtgctgtagccaccaacggaacaggtgtattacgggagaatccggcgcggaaatctccataatcataccagtcacccaatccgaaagaaagaataccgttatctgcccgagtcttaagatagtcagtgtaacgacgcatatgctgataatacttcttaatcaaagaatcatccccgtaagtttcatagtacataaacgggaaaataaccagtgaacctccccactccggggattcggcaaaagcatccattccgggaccttcaaagactacatactccggagccgttgtgggcattgccccattcggatgctgggcgtctgccatattctgcataatctgtggagcatacgctgtcagatcataattatagagcagccccggtccattgaggtgcacctgttccagccatccgagtttctcccgatgcggacaatcagtaaatacggattgcatattactgcgaaccgccttctcaatcaatcgatgagctgcattgaatattcggttggaagattcgaatgtagagactttctttgccgaattatagataaaacaggattgaatgtttttaaggacaggcagtttctgaggatttttctgccctttcaatacagcaccttctacctgaatgtaccgaaaaccataatatgaaaaacgaggatgccagatttcgtcaccttcacctttcagtgtatattcataataatgctgacgccctgtctgacgctgattacaagctccttcatccgtcaatgcttccgctactatcaaggtgactttctgtcctcgtttaccacgtacggttatcttcggaaaaccggccagattctgtcccatatccaaaacaatagcagaagggtctactgttcgtttggtagatttggaagcagccatcacctgttctgaattcagcttggttactttctgaatatcataccgttccataatcttcaccggaggtgccatctgcggacggagcactcctttcggcgcttcctgaaccactaccggacgccagtggctatcattgaaaccaacttgattccatcctttctgttcgcgacgggcgtcataatcttcccctccataaatacaattaaaggttatcggactcagatcatatttccacccctgatccgaacggatcgtctcgcgtgttccatcctcataattgattactaattcaaataaaagtgtgggaggaccaaaactaatctgcaatttgcgatagcgccctccctgtacattgtagaatccattccccaataagattcctacaacattctcaccatcctgtaactgctccgttacatcgtatgtattataataaacactcttatcataatcgctccaaagcggagcaaattcactatctcctatttttttgccattcagagaaaactcatagaatcccaggccacaaacatacgcagtagcttccacgattttctttccggatttccgattcgcattcttcccttttgtctctcctgtctgaaacgttcttcgcaagcaaatacttttctttgccaaagtatctaccgcttcccaagcagctttcacctccggtttcttcaattcgccgccatgaaactttcgcccttcgggaaggtgcgaatccttacgagtgatggcgccgatccatttccctgaagaaaagccatcggatgccaaacggaattttgattcctgactccattcggaaggagtatccgtctcatcccagacacgcacacgccaactataattaaatggattattcagacatatatccgctccttcagtcggaaccagctgactctgtgaagaagttacctttccactattccagacggaacgtccggtaaaagcctccctaatctctatttcataagcagtctgtctcgtgccattctccggtgattccattgcccatcccaaacggggacagctttcaacgaccaccagcccttcctgcatttcgcaggtaaggcggctgatcgttatattctttgcctgtacgaagcatggcagacaaagtaaaagaagaagatatttcttaaaagtcattattcgttttttaattcgttatgaataatcgtttaggcacggattacacggatgaacacggttcttcccacatggtcagtcgaagcaaaaccgtgtaatccgtgcctaaatatatcactttaatgcattctcgcaaacaagtcttgtcaacgtatctgtatgtcctacttcttttccattcacaaagatacgcaatccctttccacaatgataacgatcgccattcttatcccaaagaatcgtcagattatgaccatgatataaaacattatccagacagaaccaatcccatttatctgccggaatcagcggattaatctctatcgtatcatccagacgcggacgaagtccgatcaatccggtaatcatcaaatcattgaaagtagaatgattgtaatagcgactacgctcctgatcgcctttcagccaatatccggttacttcgtccagatactcgccaatatatggacgtccacgatgatactgcgactctacatacaattccatctgacgaaaatacacgctgtcagacaaaacagtctgaggataattattcatgaaattagccattgcagttaacgtctgtgcagaagcaaacggccagatagccccgtcccattcacatttaccaactccgcgcgtgcggaactcaggatgacggcgttctgccgtagtcaatccataaggagcagaaaatcctttctcatccataatttctttccaggcaacttcatatttctttgttgtatccggtaaattgaaataccacggaatatatccgattgcctcgcgcacattggcggaagagtcagtacgcatcgtttcaaagaactgatggcgtgtattccataaatcgttttctacgagactctttaatgtatccgctctcataccatacctcatagccattccttcatcaccggaaaggattcccattatcgaaagggcttttgcattaccatacatatagctgttaatcgtcggacgggcatatttcttttttcggccgccactgatggattcctccatgccatcctgtacatcaccctgccaatacagtccgttcttcaaacggttggtacgttcccaacgctgatattccgtttccagatccttcgtcatatccagcatgaaatccttatcgccatccaccatatagcgtgccagtacagcatctgcattccatgaactgaacttatccatcttcttcatcggtcctccatcattgccacgataccatgtatggataatctgatccagatatttcggatcacgcagccaacgactttcataaatatgatgtccgatagcacaggcaatcaggttatacttatccgaataagaacgctgaaccaaaaactcggtcataccatatccgacgggagtctccttgatatgcttgcgcaatgaccaccaacgataataatacatttcttcaaaattacgctgcgggcattcaaacaaagggatattttcttccatccattccgaagctttggcattgggaattgcctgaacaatattttcatcttccatgccattgaaagattcggcataatgactaaagtctgcatatttcaaaaaagcggaagaagcgtccttatcagtggacgaagtctttacattggctatacgatattctgccaatggttcctgtccgcctgcatcgggcaaatcatacgtttggtcggcaggagtatccacagtcgggaatgtacgcatttctccggtacggaaagcgatccgttcaatcgttgctaccggagcataaaacatacgcagccctaccctcttaccatccacatacacttgaatattacgatcggcagtcgaaagaacagcttctacatgataagtctttcctgcttcatagttcatcatatttgcaaaacgtgacccacctttcatacggaaaataccgtccggagtgagttccaatcgcgaacaggcaatgctgttcccatccaggaagtcaatttgaagtctacctttatcattctgttctgccaacaaatcaaatgagactttcaattctttcgaagccggaatcttacgttctaccttcgcatagtcgaagggatctttatcctgtagcttcagccaagctccttctaaagaaaccggtgcccaaaccggagagtaaatattccagttggtcaactcagctattgatccaaatttcgaaaaatcatcatccgcatgtgcagaagcattaatctctaccggaacaggaatgcgggaaatccacatatcttctttattcacactatatgaaacccataaatcaccatctgcaggcactccgtttccttcctgaatgccacggggatattgaggaccatatgatttgtaatttcctccatagcgcatcggagtaatttcaccatgtactaagtttaatgtagtatactccaatccgtccttactcaatgagatagccaacggccagcggaattccgacggattataaaccgtagcgtaggttccatcgctcagacgttgtccccagattttcgcattactgttgacaaatccttttgcacgaagcaccggttctgcccaggtatgtcccccatcttcactgatcgaagtcaaagcgtgtttccaaagactcgcaatgcgtccatcgggcaatgtatagcagttgaatgctttatatccttttttcagtggaatgatcggatcttcacggtcagcttcttctacccattgcatcatataaagcggattatccagtatttcctgacaagcctttacgaactcccggtctttgctctttttaaaatagggataatcggtattcttttcgttgaatccatgattgtaataaatgaaataaatcggtccgaacgaaccgtccttcttaatctcacgtactacccgaccgataccgtttccgtcgttcggatcatctttcttatccaaagctactccgtaatttcccatcgtaatcaatctgcccgacttagatacataaaagcctacacgctggtgcatgatagcaatcaagtcttttgcctgcatacccggacgggattctttggtatatccgtccggcactttgtaaggagggaatactatttccggatttgtccattgataaccgtctttcgaggtcatgaggaacgtttgggaaggtggtacatgttcatctgacggatctgccaaatactgataataaaactgaccgttccagtaagccagcataggctgatgattgtaagtccatccattgccgttcaacgcttccggatgctcgcgattggcacgcaccagttgaatattatgcactcccactaccggagataattgtccgtcgtgataggtgggattcgataattcttttcctgtgtaatggattctatcctgcggagtctgcgcctgaatggtagtcgccatccatccggcagccaatacaagaagaatcttcgttgagttgttcatgatttatttcaggttttagtttattccggattcaacttatccggtttaagtttatttcttcttgctttcttccagcaatgttttaacatctgattctgaagctttaaagatggttccgtgtttatgcccgacaggcacactcacactttctgtgatatccgtgaagttcttaaaatcacgggtacacatggcaccgtatattttctttttataaacatcaaaatagatcagataatcatcacctaatttctcgacagacggtccctctacaaacgattcggtaaatggttgtgatgacggcgaataaggtcctgtcagagagtctgaaaaagcaattttcagattacgttcgggacgtgtattatctttgagtaccattacataatcatttttcgcacgctttacaatgacagcgtcgattgagctgaaaccgggatcatataatactttcgtcttggatactgtcttaaaatcccttgtagtgatgtagtataaacgatgattattctcttcttcttcgattcccttttcaaaacgacctggtacacatgaagcccatactaccataaactgttcgctctcgtcatcataaaaaatctccggagcccatacattgacagtggtcggttcgtctgccattacaggaatcatttgttgctccgaccagtgaatcaagtctttggaatttgcataaccaaagcctaaatcccctttccagctggtggtccataccaaatgataagtaccatccggtgtacgcaccatggaagggtcacgcatcaggcgatgttgtcccaattccggcttcagccagacaccgggaatactgtcccagtgcattccgtcttcactatacagatatctcaaaccttcatcagccggctcatgaaatgaagtgaacatataataatctttattccctccacaagaagctaaaagcaggatgcttattgcagctaatgtatttcttaactttcccatttctatgattgattcttttacactatactaatatcctttatacagagacgatgaaaagccggatttgtactcaaatagattggaagattcgtcagaatcaaaatttagagacgataaaaagggcgactctccgagccaccctttcctccatcaaacaaactaaccatttaataatgggaaagaattccacttctttttatagtatctcattggttaccaatcctttcttaccagattctatacttttacagcgttcctccccgtgctttcacacgtttggcccactcttcacgttctttcgtcaaattatatccccgcttagccagataattgttgatacgtcctttgtacttgccgaaagccgcatgtttcttatttgaattttccgcatccatggcaaactcacgcgcttccaccaaccaagcatagatttgtaccttttcttcttctttcaaagaaggaatcatatcaagcgtagcttcataagtcactttcactacgccataagtcattccatcttttacggcttctatctgttcctcattcaaaaagagagataaactggcaggaaaagcaaagtgagaacggtacaaagctgcatctttttcattttcagcagccttcaacgcttcatttttcgcatcaccggtcaaacctgattccttaacggtttttacttttgcatcacgtatttcataaatatcattcagttcgaaatagcgattggcaataatattacaaacgtcttcggctgctttcacatccgtaagtcctagtttatctacaattttctgcgaacgattgactatagactctacatatttcggatcacgattctctttgttcaaatcgactgctccggcagatatccaaccgcaaagcaacaacagagacattaaaactatctttttcatttcatcttattttttataccatatgccaaaaggaaacccagttccggcatcttataccgataccagttgcagattacattaattttcctttctcagccaatgtatcgtagttattttttaaatctctccagtctactttgtgttttgtactgattccattgatatacttttcaatattcgtatatccgtcacctgtacaatctttattagcatcacttggatcattcggattcaatccattagcaatttcccattcatccggcataccgtcaccatccgtatccacatacggagttcctttatattcggggaaaccacccatctgacgaatatcagtaatgatacctatcttataagaatctttaggtaaacgacgatatttaaactgaccgtcttctcccattgacttaggagacaagcctgtaagatcaccattagcatccttcgcaagtttcttgtcataataaggaatacctgtttttacttcttctatgatgcgttcgtccacgatatcacggcagggtatattggcaccaacatgttttgtcacataatcataagcatcattagctgatgtaattttgatataaggcattgcaaacggctcatagctccgcatattctcagtatatccctctgtatttggctgactctcgatttggataccaccattccagttatctttcgtgatttccggatagccttccataacgttaccatcagcatacacgcgaccgtataccttataattcagtttactgcgtccggcttccggtttcagaatacggcagcctaccgtattattctttggagtagcaggaccgggtttataatagttattgatcatattgaacatggcggtataatcgccaccatcagaagaacgatgcacccaattaaatactacattattaacgaagttgaatactccattccagcctacagacggattgcgaccagagttgctggcccaaaggttacgcataaatgcacagttctcacctcccagcgtactgccgaatgcatggttataggtatccagcgctttcgcagaaattgtattctgaatagttacattgactgtcggaagcttcaaatccttgctttcatattgaccttcactcggatcgtacatatgacggtagaaagatatattttcgtccagtccccatgtacatgaacagtggtctatcatgatattaccaatcggattaccaccgaaagagtcgtcacgatgccatacttttgtttctccacgacggaatctcatatgacgtacaactacgtcgtgtgtatccacccaaaatgattctccggcaatgcagacaccatcacccggtgctgtctgtccggcaatagtaacgtaaggagcacgaacgataatcggagaattcaatttgataataccggaaacattaaacacaatgatacgggcaccaccagtctcacacgcctcacggaaagaacccggaccacggtcattcagatttgtaaccgtaattaccttaccaccacggccaccaaaactatacattccgcctccttcagcacccggaaacgaaggtattttagcctgtggcaagtcataaggacgaccggcccatgaaatataaggacgtccctctttggcttctttcagtactattggtaacgctttctcccatgcttcatcagagagacgacgttcttctgtcatcatctttttataattttctttggcttcgtcatttatttgcgggtattgtgcccagacaacagtcggagtcaatattgcagcagcaaaagctactaaaagtacatgtttcttcttcatttttattgggttttgtgagattgttaattcaaaaatacaataataagacgagagagaaaagagtttgtaatcaggaaaaagagttttttatttagtggaatagattttcttttttaatccagacaaaaagacaaataatgaactcaaaatatccctttagagaaaggaaatacgttgagttcacctttttattaacttattcttttctaaaaatcagaaaagtttttattctgccaatggatcaaatgtccccataccaccgtgagaataatcttcccaaccgatagtctgatataatgttgcatttgtttgctgagcactttgacgcaatcctaagaaataatatcttggttgaaaaacaggattaacatcaaccacgttaccatctacacttatatctttacgcttgaaatatgtgtcatagaagtcgcacacagcttttacagttgcgttagcaatggttgttccatctgcttccgttccgattttttcattcagagtcaaagccgcgggacgttctacatctttcaaaggatcactactatcagcagcagagcccaaatcgtcaatataaacttcgatacggtgtctcttgccacgatcattcattgaagtcacacctagataattacaagtattgccaccaaatccggttaatgcccaactaggattcaaattaccttgtcctacaccaccatcaaaaagcatccaacgacgcatgtcatacgcacgtttaccttcgaaagccaattctatctgacgttcatacaaaatcgcttcaaataatttagcacgatctgtttcaatagcggcatccaacccataattattagactctgtatatcctacccgaccacgtacagccttcaaagcttttactccttctgcgtgataacttccacctgctccacaagcagactctgccagattcagtaatacttccgcataacggatttccatgtaaggagctgccgaacgtctaaacccttgctgatcgccgctacttttatcagaaaatacattaagactactggtaggatcatcattcgaacgtttacgtacatagatacctctgttttttgttcccaacatatcagcagcaaagccacttttgtttgcatcgtcacgctctgcctcggtagcataccagcaatagttccatagctcgtagtcattaccgcttttatagcggcttggacataaattgaccatcgtttctccagaaaaatcgacatctccgctattgaactgccattccacacccgggaatgcaaaagtacgatagaagcgaggatcacgattcataaagaacttgttatgatggtagtcatattccgattctgtaggctttttaccatcagccatcgggaaaagatctatcagctctgaggtcggagttttacctccgcttccattaatattaccaggacggattccttgttcccacaaattatatttgtgtacattctgtgaagcgacaggagatatgttattatataaagtaatgaacacaccttcatcagctcctgtataagtagcaaacatctgggcccatttcttggcattactcgttccgccatcactttcgtaagcaagtccgaaattacctgctttcaatgcagttatagcagcttcgttagcctcataagcatctttccaacgttcagtattatcagcacggttgaataacgggctagcataaagcagcaatgtacggccctttaaagcaagtgcggcaccggaagttatacgaccataatcctgaccatcatttggccagcgtgcaggaagatatgaagctgccaaatccaggtcatcacatataaacttcacacagtctttggttgaagaacggggaattaccaggttttcaccatttccgtcaccaataaccggattttggacatgatctacgataggtacaccgccatacatcttcactaacagatagtaacgccatgcacggaaaaagtgagcctgcccaagcaacaattctttttcttctttagagagtgtggcacttcctgttacaccctcaatgacatcattacattcacggatacgtccccaaggactcgtttcaccattgataacgtaaaaatagtcaggaacagtctgtatcgtcaatatttccgatggattattaaatgcagaataacctccatattcttccgtacattttgagaagtcatcatctcctccggcactggttatatcagtcaaagcattggaacctcctgttgcgctaggcaacaaacactggtatagataatccacacggcttgtagccgtttcgtaattttcatatacaactgaagagtcgtaacttccatatactttcttatctttcagaaaatcatcgctgcatccggcaaaacagattaccgctgctaccgtcaatgctttcaaacaatatatatttctcttttctttcataatcttcttttactattagaatgaaacattaacacctaaagtgaatttacgcaagttaggataatttccataagtgcctgcccatgtgtcccatacaccaccatcgtaagggttgtagaaactcaatagattctggcaggtcaggtttaagcgacaactactgataccaagtggcttcatccactctttcggaaggctgtaagcaactgtcagattacgcaatctgatgttggctgcgctaactttccagaatgtagaagcctgaccattgatagcactgtatttcaaattcggatattttgcattccggttcattgctgccgtcacatttccacttgcatccagtacatcttcatatatatacatatctttccagattgccgatacatttttgtactccatattggaatagctttcttgacgtaaatttgtctgcatcagagcataagcaccccagctggcaccaaactgtgcactaaatgagaagttcttatatgaagctccaaagttcatagtcaatccatacgggttattagcacgatgagaaatcttcacatagtcattttcatcaatcacaccatccttttcaccataacttccgtcagcattacgttgtccacgcacgtcacggtaaatcaatgttcccggatgtatattctctttagaatttcctaaatatgaagtaatattattcgtagcaaaatattcctcaatttcctgatagctgcggaacataccaagacattcatacccccatacaccacggtcagaacgttcaccacgaacaatgtcatcaaaacccggagtagcctggaatcctgcttccttaatcttattatcactataaccagtagtcagttttacccaatatgagaaatctttgccgattttatctttccagttcaaagtcagttcaacaccatatgtatcaacctctccaaagttttcaggagtagcctgtgtacccacagtggtcggatagaaagaagttccggtgaaagttgtaaacaactcacgtcccatatcataatatgcatccaacgtgataccgaatcggttatctaacattctgacatcaatacccaagttggttttataagttttatcccaatgaacatctctgtttacacctctctgaggcatctggaatgatgcaccactggacgtgttgctagaagtaccaaatacggggcccttgtctgcattacggctataaagctgtgtccacaaccaaggttgtatattgtcacgtcccaaaataccgaatgaaccacggattttcaagaaatcaatacccaatttttctttattaaaccagctctcctctgacattacccaacctgctgaccaggacgggaacattccccagtaattttcaggagcaaactttgtagaagcatccgaacggagcaggaactcaaacaagtatttgtcggcatacgaataattcaaacgaccgatataagaaagcatacccgattctgtacggctgaaagttgttgtttgagtagcgccggtagcagtagaattagactgtccgtcagtgaaactgaaaggatcggtaatattgcctgttacatattcatattccgattcagccttttcaattgagaataaaccgctaacattgtgcagaccgaactgacgggcataactgagcgttaagttcatctgatagctatccgtcttattcatcgtacgagtcagtaagttgccattatccaaagtaaaagtaccaaagttactttcatcaagatcaatatcatcacctgtatatagatgaccgccactaccgccacggttcaacaatctgtatacatttattttagtaccaatattattgctcttgccatttacgatatttctggagtaagaagctttcagtttcaatccctttgtccacttaaaccaaccgaaatcatgttccaatgagccattgatagacatattattagtctgattctctgtattatccggagaattctgaacagctctgaaattgtacaactgcacagctgttaaattggaagatacattctgcatacctgtataaacaacagggcgaccaccaatataatcgggcacaaaaggcaagtgagtcatcagtgaattgaaatcagcatctgttccaccaccacttataccattacgcgcattattctgttcacccatatcacctgatatctgaaaagaagcttttgtccatttaccaatattggcatttacacctgcacggaagttccaacggtcataatccaggcgtcccatgttaccttcctgactaaaataggaagcgcctgcgaagtaagttgctttatccgtaccaccattaatattcagactatgacgctgagtccatgctgcactccattccttgtctaccaaatcatagttcaaccctctcattgtatccaactcgtctgtttggaaatactgcgtccttaagttgtccgattccgtatcactggtagatgtaccagctgcacgagccgcattataaatacgtccatagtcataagcactcagcatcttaggaagcttcagcgcatcagtgaaaccaaactgtccgttataagaaatcgaaggtgtacctactttaccacgtttcgttttcaccaatattacaccgtaagctgcacgagctccatatacggctgccgaagcatctttcagcacagtgatactttctacttcacttacatcaagattattgaaagcttcttctgtagaaataaaatcatctattacatacagcggactcgggtcagcatctccacctcttgtggaagtaggagtaacacttgtattaatgctactttgacgaatctgcaaactcggcgtactacccggacgaccaccgcccgaacttacatgcaaaccactcatcattccgctcaatgcatctcccaagctacctaccgaaaggtctttaatctcatctgtggaaagagtttcaatggcacctgtcacgtttttcattttttgcgttccataaccgaccaccactacttcatctaatttagccacatcttccatcagaacaattttcggattattcagattcgttatcgtctgagaaatgtatcctataaatgaaattgtcagcttagatccctccttaacggaaaggctgaatttaccatcaatgtctgtaaccgtaccgaccggagagtccactaccttgactgcagcaccgataatcggttctcccaaatcatccattactgtaccagttaccgtccgtgtattttgggcgtaggcagacagagtaaatgccagcaagaaaaccagacataaattaaatataatatattttttactcatagtatcttatttttattttatacattatttattcatctctcctcaaggaagccagcgcgggtctccagtacgggcagataactgttcatctccacgaggagtaaagtctttcgctgtttcaacagcattacccggatcagtcagtttaggatctgtttcaatcggatttgattcataagtggcaatagatccgtctgtagaataattttctccgtaccaataagaatttctggagaaactctttattacgttattattattattcgtaattcgtctgataacctgattatttccgctgtctacaaaaatattatttgaaatattcatgaaagtagtattctgaagcattccactccaattagccatatctcccttgttggcaacattatagaatgtacaattctgaataataaggccacctctgtatgacacaccattatacatagtactgataccatatacgtcactcttaagttgattaataaaccaatgtggtccacgagaactaaagtgtatgaaacgttgattagacgctacagtactataaagagtactattctggaaagccaagtgtgcaatgaatgcattagacgaattcatgtgaataataatattagattggttaaaacccagaatacaatcgtttacagtgaattgtttcacacaatatgacgtactgttacagtaaatcagatgtcggttaatgcctctgacttcgcaagactgaatcataataggatcagtaatcacaaattgaccgggagctgatgccgtcaaaccggctccgcttgcatcgttgctaagcagaataaaggagttactggaagagccgcttgatgccgcattacaatcaaaatcaatgaatttgattttcagacctgcacaagttacgaatctggcagattctccaaaagttactttcggatgattcactttatcgccacggaaggttactgcacgagctccgaaatcaacaacgtcattcattgtatatgtaccaccggcaaccaaatcataagcaagttccgtagccgaatccggtagaggatttgccttgaaatattcggcaatgtccgtgcctacaggaatagttccggtagtctcaatcaacgtggtgaaatctttttcaactgcagctttcgcttccgtattgtttaactgagtatttcccaaagttctgacgcaggccagatacttagtatcatcaccaatatcacgtgttacactacatccatctacaaattcgttttcctctccaaccggaaccttttcttccggattatctacattataaaatgagacctcgtatccaccggcaccttccacgacattccatttgattgtggcagttccatcgttgttattagccactattacctccgtcggagattctagctgtgcatttttcacgttggaggtccaagttgcattttcgtcgtaccctatagtacaaccactaaaaagtagtacagcaaccacaaaggctaggccatacatctttctacgcgaaaataaatgtttattcataaattaaattttaattaatacaaaataactgcatattcacaccttcaatttttctttagaattgttccttttttcatctgtttactttagacatatataacttcatattgccatccgcttaatatactaatgacgtacaacttaaaaatatgtaatcactcaaaaagaataaaaaatcatagaatctaaaaaatgtcctatttacaagatataatcaagcggttgatctgaatacatcaattggtcgatcagaaaaaaagatgcggtcgattgggtcagatgaagcgatcgattgaagtaaaacgaacggttgactgcactcaaagaagcagtcgattaaaacatctaagatattctattgaaatacctttttcagatattcaatattcgttccataattcttcttcacgttcctcacatcatccttgtctcgtgagcgttctacaaccagccagcccctccagcccattttgtcaagcgtcttttttaccttattcatatccagccgctcattgaaaggaagagtcactccatccgtatctgtacagtgaatctggcaaattctattttttccaagaatcttgagttccttacatagatctcttccattctctaatgcattctgaaatttaaaatagtttcacttcttctcttgcatccaattgagtttcaatgccaattacaactctttccgaagcagccatatcccctacttccttcagccgttttattaaagctgtccgaagttccggagtttcctgccagcctgcttccactccacccaaagggagaaaagcgaccttggcacccattactttcattgcatccagacaatcccgaactaattctttataattagcacgatctaaaaaagactgtccataaaaaccggacatagcaatagaaggaacctctaaattatagttctgagctgtttcacgaaatagctgctggaaatggggctcacgcaatttgttatcgaacatttctcttttaccgagactacccatatccaactcgactccatctcctttcaactcatgcaccaattggaacgaaccaatcttctgacgtttcaatatcatccagtcacatacggcgatcttgtaacgttgttctttttgtttcgatgcagcaacagccagcattggaaaacattctgctacgattaatatccaaaggatatgttgaaataatttctttctattcatcatcttaattatacgctgatcgtataaaagacggatgaaaggaaactttgtaatcggctacattccaaatatttaatactaaaacggaaaaggggatatttataaaaataagataatgacactatcccaggtaaatggtgtcactataccactgatatagtgtcattatcgcagacatatagtgacactatctttttgaaaggattattcaggtaagatgtaaaaaaataggctgccgaaccctgaaaagtccgacagccttgtcaacccaaaaacgatacctatgaaacactgtgtgttatttcaaatcaaatatcaagcgtttaccatgaacaagttcatcgtgggtaatgcggtatttattgaacttcttaccatccaataacaccttatttatataaagagtttccgatccggtacgattactctcaattaccagctcattttccttataccatttaggatccaagcggatcgttactttattaaataccggagtagtcaatgtatattccggcaatcccggacagtcgggataaaaacctatcatattgaaaatagcccatgcagacatcgtacctgtgtcatcatttccagggataccgtccggtttggtcgtaaagtacttatccagcagtcgctgtgtctctttctgtgtacgccattcttcacctttaaagtaagagaacagatgagcgtaagcaatatccggttcgttagccggatcatatagtccttcatcaaacaccatttgcagcttattgacaaaaggtttctttccacccatcagtttagccaatccatatacatcatgtggtacatagaaagtataattccaagaattaccttcgtggaaaccgggattcggttcaaagttctctccctgcctcggattgaacggactgtagaaagttccgtctggaagaataggtcggaatgtaccgaactccttactataataatgcttatatcccaaagagcgtttatagaacatttccgcatctttcttctttcctaaagcatccgcaaaacgggaaagggcaaagtctgcgatataatattccagtgcatgagatacggagttatcatattgttcacgaagcggcacgtatccttttgacatatagtcatcattgtccggacgcatcagattttccgccccgggtaatgtagccgacttgtacatagcttcataagccagatctacgtcaaagtcacgcaatcctttcatccatgtatccacaatcactgggatacttggatcaccttccatcgtaagagtctctcttccatacaattcccatttaggaaaccaaccatgttcacgatacatatcgagcatggtacgtaccatttccatctgacgttcgggataaaccaaagtcaaaagctgatgtacgttacgatatgtatcccacaaagagaatacagtatatcgggtacctttcgttgtcagaatctgatcgctctccatagccggatattcaccatttacatcctgcagaacgttcggatgaatcaacaaatgataaagtgccgtataaaaaactgttttctgtgcatccgttcctccttctacagtgatacgtgacaagtcatcgttccactgtgcacgggcatcggaaagcacctgttcaaagttttttcccgactgttctttatccagattcaaacgggcattctctatgcttacaaaggaaactcccatctgtacttcgacctgttctccttcctctgtttcaaaagtgaagtaagcgcccacatcgtcacctgctatttcttttccatagcgggtatacaatttatatttgccttggtctcgatcccattctgcttccacacctgtcatcggacgttgctttttccaatatccggttgtggtgggaactttgttcactctcatcacaaaatagatgggaaatacagcttggggattataacagaaagtacccaatagtttcattccctctatttcgctgtcacttacacgacgaagcatggctccactctcattggtcaggccttcgcccaaattcagaagtatatgactctttcctctaggaaaagtgaaacgggcaatacctgtacgcggagtagcagagacttctgtctttatattatacttcgtcagataattggaataatagccgggagaagcctgttcatccttatatttgctcccatattccttatagtctacattcagttctccggtagtaggcatcagcaataaagaacccagttcaggacaaccgacaccactcagatttacatgagaatatcctgtaaagaaacaattggtatattcataaggcgtagaccaccaacgtgcatctttatcgtaagtattatcagcagaacccatcacattaaaaggtactacggacatcattccattcggacaaacagctccgggattagtggtaccgaaatttgtcgttccaataaaaggatctacatagtctatcaacagactcttttccttattcatagggggggccttaccctctcccccaaatacggggagaagggtgaaagccagtgtgcaagttaataatatacgtctcatatccttcttagataatgctcgtccgttttgtaaaatcaattatttcctggatatagccgaaagccattcctacaacagtatctgcagctccataataaacagctacacgctcaccatcctgcaatgccgcacatgggaataccacattgggcacatcaccttgaagttcataaggtgcagccggacctatcagatattcacgggtacgataaagtaccttttcgggatgatccttatcgagtatcgccgaacccattgcataacggaaaccgttgcaagtagtgataacaccatgatagaaaagcaaccagccttcatcagtaaggaaaggtaccgaacctgcaccaatcttggtacactgccaggcactttcagggaaaggagtcactttcataacacaacgatgttcaccccagtatttcatatccggactgtagctgatataaatatcaccgaacggtgtatgtccattgtcgctggggcgacttaacatagcatatttgccatctatcttttgcgggaaaagtactccattacgattgaaaggcaggaaggcattctcgcattggaagaaatctataaaatcaaatgtataggcaataccgatagtaggtccatgatagccgttacaccaagtaatccaatatcggtcttcaatccatgtaacacgcgggtcatatttatattcggattcgatcatttccgtgttaccggctttaaattgaatcggttcatgactaatatcccaatgaataccatctttactgaaccctgtgaagatattcatctgtacagctttgttgtcacaacggaatacgccggcgaacccatctttgaaaggtacgacagcactattgaaaatactattggatgaaggaatatgatagcgtccgatgaccggattttgcgagtaacgccacattacatctgtacatccgacaggacgttcttcccagggaatttgaatcttattcataataattatttatttagtaattagttatctattatcactcaaaaatagcaatttattttttcttttttgaatcatcatacgtaaaaggtataaaataggtcatcaaaaaagcaggaattgttgcgatcagtacatagataaagaaactacggtatcccagtaaatcactaaaatagccgctgatcattcccggaagcataactcccagattcatgattcccgaagcaaatgcataatgtgacatctgatgtttgccaggagcaatctgctgcatcatgaacaaggtcagtccgacaaatccgaaaccatagccgaaatactccattgtaatacatgttccgatcagataaagactggtcggctggactacagcaaggaaagtataagcaaggaaaggaaggttgaacacgcaacaaagcatgaataaagttttcttcaatccatatctggcaacaaatattccacccagcaatgaaccgataacaaaggcggcagaaccaaagacgccattcaatgttccgatttctgtcaatgacagccccagacctccgacctctctggaggcacgcagaaacaaaggagcaaccttcattataaatccttccgccaatcggtagagaataatgaagaagatataatatactatatgttttttagtaaaaaagtttccaatcacatttaccaaatcctgcatgatttctgaagtagttttttttccggtagcaggaacttgtgtagaaggcaacatctttatatgataaagaccgagcaataccattactgcagcaattacggcaaaaataatcatccatgcagatgaatatgcacccttattggcatctatcgaagctccttctattgccccgaaatgttcggccagcatacctgccaaagcaactaatccaccattggcaaccaattttgccacattatagaaagccccctgcactccaatatatttagcctgatcctctttattcagttctgccatatatacaccatcgcaagcgatatcatgtgtggctccactgaacgcaatcaccgccatagtggaaatactgatagcaaagaaataatcaaagaataacgaaaaagctactactccaaacaatataccactcaacagttcggttaccagtacaaaaaactttttggtccgatacatttcaagaaaagggctccataagaatttgagtgtccagggcatcatgataagagaagtccaaaacgttatctgagtatcagaaatacccaaatccttaaacatgaatacggaaaccaaattgatggcaataaagggaagtcccattgcaaaataagcggtaggtacccaataaatcgggttgatagtttttccttgagaagcagttttattctgttgcatagttcaatagtatatagatgaaagggtcatttttctgacccatctatatataatacaactaagaagggcaaactactaacgcttgcccctacttttttttattttattgttacttcgtcgataaagaaccacgaaggatgccctacaccataatgccattcgggacattctttcgtaccggtgacctcaactttcacataacgggcatgcactggcatttccgattcagtcttcactccgcggaactccactttccccgaacggttttccggcatatcatgtgttccccaatgtgtataattctctccatcttcagaataggaataaaccaccttcagagggaaaagaatccaagctccgatctgatgcaggaaatccgtatctatactatgtatttctttctctttacccaaatctataacaaaagcaccgtctgttccttcccagccaatccagctttcaacgaaagtagatcctccgaatagtccgtccactaatgccgtttttccgatttctgcatatttaccggtaggaggaataagataagtaaccttcgctcctatcgcaacgcttttttctgcacggggcatatatctctcccgatacaactggcaatattccacaggagaattggaacgttcattcaatgtcggtacattaaattctttcacccgttcttcaaaaagtgccaatttcggactgatctcattcatatccgtaccagtctcagtacgggcaatttccaattccgaatactgaatgggcaagcgggcacgctgcacacgcttcaggaatttattatcttcagccaccgctttctctgcatcatcaaacagttgattataacgtcgcatcagttgtggtttcagcattccgtatttatgggaaacaggagaatcataaatccacaatctttgtccgctgcctatcaacgctccctccatcaccttgatatactgataaaggtatggcgcagcctctccatagtatccatgcaggaaatgctgcatcaaagaatcaacattcgcttcggggttccacattaacttagataccagataggcacgtaactcagcgaagtctcctcccctgcttcctgcaatctgtgagaaatgcatagtggcatgattctttttgaacagacgaatattatcctgcaagatatgaaaattagggaacggagccagataattatcaaaattaataccataatcccacacgaaaatattattagtgatggcagcccagccttccattgctttcacaaactctttacctgaggcattttccgtcaaagtcacttcacggtcacaatctatatcacaaagcatgatattcacattcggcaatggcttcacatgtttcggaggattcatcgtatacagataggcaagcgtggaaaattccttatcgggaaaacgggcagccagcttattcaaaaaagtaatgatacttcctgagagtgctccttcataatcatctatcgctttgcaggcatcacatgtacaattggtataattaccatcattctgactcacagacataatatgcttatccggatttgccttaaaaatagaatcaatccgctgagccacgatttcaaaaacttccgggttactcagacaccattggcttgctttcccgggatggcgtttgcctttaaaataagaataatattccggatggtcttttccatatacggaagcaggaagcaacttatcaaaagtatgcacccaataaccggcagcaaacacttcgtttggctcttccagcctgttccaccatttatatatggagtctgtacgaatagcataacattgtgtctggcggtaacggaaagccggattatctattttatcgataagcggcagttcgattgtcttcgcagggttaaaagagtattcgttttctccccagtaatccactccaagatattgttcgagtaaagttacaactccgtagactgtcccattcccactgcctgaaatacgtaagattccatctttcgtagataggctgaaaccgtcttctgtcactccagctggggttttgctactgattataatatctcctttttttgcattctgcccttttacaatgggaaatgtacaacctgaaattctctgaaggaacaattgaaataaatttgctgatatttgattaatctggtcattttctgatagaataatcctggatttagtttttccattatcaactaaaacgacttgtgctgttgcaggaatataacaacatgctcccaacaaacaaagcagctgaaaaataatacggcgaatgattctcatagcatttcctttaattagtttttagataatacaatccaaaaatataagatactcaagaaaaaaaacagttctaagttttattaacaaagaaaacttagaactgatcacaacatgatataaacagcaaatagcccaagctcattcagtaataaacttgggccattttttattcagtttcagtataaatacctacagtattaatataaggagaataataaagagctccatggaaagttactcttatatattgcgcttgtttagccacaagaagaagaatgtaacttgtcttatttgcaaatcctgaagctacaccaagatcctcatatttctctccatcattacttatcgctatacttgcactttccgaagaataaaaccattcatagaaatgtaaagcaatagtttttatattctcttgttttcccaaatcgatatcaagtatgctgccatccggaacataatcatacaagtcgctagattgtccattcaaagtaaaactccaacccgaatggtcatttattacagaacctaccggtttgtctacacaagataaaaatccgacaagtgctgttttataaacaatatatataactttattctcgcctatatctgctcctactccatcaacattcgtgattgtcactggaataacatagttagtacccagctgcacagaagccatatcatccgaaaaactcaaggcaacactctcttccggagttgtttttccttgtttaatcattattgtcgattgcttcaaacttgcactagtcagtaaagaataatctgtgccatgcaatgcattatacgttccaactaatgccggattaatagcaagagtaactttggtgtcaccatctgcggcccatgccgattttaagataccgtcaagcttccattcactgcttaaatttgtaaatccttgactatactgatactctaacagatattctttacttgaagtcagtgtgacatgatttggtttgtaagtcgattcaaatgtcaagaatatcttactattactttcactcgctgatactcctgttccattaatagaagttatagcaatcgggagaatataattttccgatccgttcttaaattcttccatattagtataatgcacttttaaagtatctgcagagatatattccccttgttttatatacaaagttgcattttccagttctgcattttgtaaagctacatagctcgttccatattcactgttgtatgcatctaccaatgacctgtcaatagctaattggatggtcaaatcttgtggtgcaggtttagtacacctgacaggagacaaaatatgttcggtggcgatttctttcaaaaaagttccgtctcctttatactctaaagtagcatttgtttcacttggtttataaatatagacataattgatatcatacggatctgttgcttcgtcatcgtcacatgctgtgactaatggcaatgacatagcaaaaaatgtactgtataatatatatttaaataatgctttcatatcatactgttttaaattattgagcaaatgaatatgtttcccatgtcaccttttgacggttttcgttacctaggttagaattgccaatttccacatcatgaccattaccggttacatcgtgtagtattgtagctccttcaccttcattcattggcagatacaacaacaaattcttgtctgtatagtcaacttcggtatacatagatttctttatctgattaactgtgcgtgtaactttccaaaaacgaacctgacacatttcacagaaatccggaaaatattcttctcctgaagaaatcatctgaaattgatcaatattcatcggttgtcctattgaagaagataatgaggcaactacagtaccattttggtacaataaagtagtaccggatgctgcatcataactcactgcaaaatgataccatttttgtgcttctaaaccttttcccttagttggatcacctgtatcaaattgagaccccatcgtttttacttgtaggaaattatttttatagctaccattctcggaatagattaagtcaccaaaccgtatatatagttctgtccctgaacctcctgagtttattatagcctgattattcttagtatatccaccgttccctgatttagaggtgactttactccaccattccaatgtataatttggcaaagctaacccccaagctccttccggggctgcatgcataccattataccatgttaatttaggaacagcttgtttcaaaggcttcacaagaaccaataaaaaactggaagaggattccgacttctcaatacctccttccacattcttaatactgatgggaattgcatattgagcaccgccttcagcttcaaaacttttaatatcaacattcacaggatctgcacttacagaacctgcttcaattgtcactgattcaggaaatgatatatattctttaggaggcattttataattagtttcattcttcttattataagcatctaatacagattcgtcaataaataaattagcttttattgtttgattaataatattcaccaaacgtacagttaacgaagtacgcgtcgtaccctctgtcaatgtcaattctttagttttggatgtagacgcttcatttatatagactaaattatctataacatcatacttagcattttcacatgcagtatggaccagtgccagtaccccaaatgccattattttaagtaaagatattctcttcattgtttaaccctttcttttagttattaataggaggattctgtgcagcaatagctgcacgcactgtgggataatcaggatttccaggataatcatactcaatatgataagcccccatacctgcatgttctattccacaagccggatgatagctctgttgctcggtaaagtaatgcttatccactgctctttcaaaagttgcagtcacaatagatttccccatagcttctttaaagacattagggtgacttctacgtacagcttcaaagaaagaatccaatccagaatgtcctagttcataggtctgccaagctatataatcaagacttagaactgtttcctctgaaagcacttcataaaagctcaaccaacctgcaccaccagggatatcagcaaccaacattttccccgtcttatcaaactcctcacgtaaagtcttcataaacgcattgggtactgatggcatactggagttcattaaagtcccccaatcctcaatatcataatcaaatccatcgatattatatttgttacatgtatctacaatagcaagtgcatatttcttagcagcctcaatgcaagattgctcatctttaggatcaaagccccaaaacgcttccttcactgcatcatcgttaccccccggtgtgagattatcaccaatatctcctgcgcgccaacaaagcactgctctggaacccttagcctgaaagtcttttaaatcagcctgttgctcaaccgtcagatttccccaacagagccaaaggctcacaaaatccgtactgtccggtaatccacataaagcatattgcatggaagaacctcccttacctgcccagttaccaaaccagccaaacataatcttatgtggagagttaaaataatccttcaaattattttcataaccttgcgtaggaggttcataataatctttcgcctctatgtcggtccaatcactacatgcgatatttaagaatccctgcgaaaaaaagagagaaattcctattccgtatattatttttttcaatttgctcgttttcataataaaaattattttaacgttctgatttaatttttcttagcccaccaaagatctgtggcagagttatctgcaccacctaacattgatacagctgctttcacatttgcattattcgtattatattctgactgagggaaaggcaaacgacgcataccacgctgcactgtcaccccatctgtattcagattattcacgatagggaatagtttaggataacctgtacgacgaatgtcagcccacgtttcccaaccattcggaaaattggcaatccacttctgaatcaaaatacgctccaaattctctgtaacacttgctgattcattatatttcggagttacagttgacactgctgctatatccttacctgaatccgaaggatcactgtaagcagcaggaaccttttcacttttcaaataatcgccaatagtagctttacgttcttccatagacactgtcactcctgcgtcataaagttctttgggagttcctcccatattccatttatacatcaatgcagcttctgcacgtaaaaaataagcttcagatgcagacataatgagcaattcatcatctataccaatattcaggcgggagaattttgtataatttgcctgagttgtagcactttggtaaataccatttcgcactcctatttgtcctccaccgatagaagcatctgcttctgatgcatatttagccaaacgaggatcattataaccgcttaaatatgaagtgatattagcactgatacgaatttcattccatgaagaagtaacacgataatatggattcataccgtcattatatttactatatgcagcatctgatgcagatgtcatcacaccaattacatcagaaacagcttcttctgctttctccttggcaagtgctggagaaacactagaaatgcgcattgccatacgaagctttaaagaattggcaaatttcacccatttgttaaaatctccattaaatacaagatcgtattctgataaagaactcatatcttcattacctaacactgctactttaaaagcggaaatcgcttcatccaaatcatcaaacatgtgtttataaagatcctccatattgtcatattctacagtaaaagcagttcctgtaatttgagaataaggaatcggtccataacaatcactaattttaagtgaagctgccacacgaagaatctgtgcccattgataagccaatcctttgccatcagaaagatcacgtatctggaaatatccggtataaatctgtggcatagtagtatcaaacatatttccataccacccaactcttggattgtaagtataataattacctccattaccccattgggcgatacaagtaatttctccaccatattcagatccaatcatctgatccaacatctgtgaattgttctgttgtccttgtactaatgcaggaatcatgcttttaatcaatgatccggtgattgcattatcacccagcatttggtcaggtttaggtccaaagggatttgtattatactcttcaaatttatcggtacaacctgttcctagtgctactaacaaagtatacacagacagttttgcaaacttctttattatcttattctttttcataatctaaactagaatgttagtttgacattaaatccgagacttctcaaactaggttgttgaaaatagtcaaccccctgatagaaattactagtgacagaagatgtactttccggatcataaggtgctttacaataaatcatccataaattctttcctgtaagccccagtgtcatatttacatgatttttgaaccatgttttaggaagttggtagctcaagctcagttcagaaaggcgaatattcgttgcactatatgtataataagtaccaacagcggtagttactttactataatattcctcagcatccactttactgtctccaacccatacaccgcctgcctgacgagcaactgcagaactttcagatacaccatatttatcaatcatggcttgtgtatccgatacaactaatcctccaaaacgcccggtgaatgcaaatccaagattccatcccttccaagcaacactaccattccatcccaaataatatttaggaagaatagagccaaccttgcggtattccgtattttcaatagccaaacttccattagaggggtctttccaaatatatccattaggagactgacgcaaacgctgattgatataaatatctcccattgatccgttttcatagagtcttaaagtcggaccaccactagttcccaatgttccttttgagtaatactccatttcgatagcttcgccggtttccggattgatggcaccattcgctaaactaacgatcttgttttgattaagagtgtaagtgaaatttgtagataccttcactttatcaaatgtatcagaatatcctaaagccagctcaataccctgattctgaatattaccagtctgcacaatattattcttatatccagatgaagccgatgcatcaacatagaatgtctgattgaaggtattagaacgatagaaggtcatatctaaattaatacggttgccaaggaatttagcattgacgcctagttcccatgattttgtattttctggtttcagattagtattataatgacttgcaggatattcatatgtatttgtttgctcattataagtatattgcatttgggtaaggtatcgattaggggaagaagcgacctccgcccacgaaccacgaactttcaaataagaaatagcttttggtagctttacagattcactaacaagccatgacagaccaacagacggataaaagtagaaacctttgctggtaaaagctaattgagatgcccagtcattacgcccagtgacagtcaaatacaattgatgattccatcctaattctgcacttgcaaaaacactttgtacttgatcatgccattttgattcattacgcttggaagtattgacattaatattgccataatggaagaaattaggaatttgctccaatcctccttttagatacatagcatcttcctgaatatcattaatagaagcaccaacagttgcattcaatgaaagtttgtcatcaaagaaattcttatttatgctagccattacatcagcataaacagaccgatcattttgtttagtatgtccataataacctttagaactactttctgtaaaagtacctcgtgtactagcataatacttttcataactatcgctatctgaattatccacacgtactcgccctgttacattcacccaatctgttatatcccatttcagactagcattaaacatataacgacgtttagaaagctcattctgcattcgattcataatccaatatgggttttgcatatccaaatcagtaccaaatatagattccggccaatattgtaccataaggtttcgagcctcactatagcgttcatacatctgtacttcctgaaagttttcacctcgtggaaaaagataaagagataccaagggattaaaatattgtccactacctaccatattcttattattttgaataatatattgagctcccaaatcaagactcaacttattatcacagaatttagcggtattacgaatagagaaattatagcggttataagcattattaggtaagatacctgtagagtttgtagtagagacagatgcgtaagtttgattttgttcagtaccagtggtcaacgtgaaaccattcatctccgtcattcccgtattgaagaagtcagatggatcaaagttgctaggagtatccatcaagctcccccaactgcctaactctccttcacgattaccataaatattctgaaacttcggcatcatcatcggagatgaaaaacttgtactattactataagaaatttgcacttttcctacagtaccttttttagtagtgataagaataactccattagaagcatccgaaccatacaaggctgcagcggaaggtcctgttaaaattgtcatgctctcaatatcttcaggattaatatcagctacgctattagatcctggctgtttgttcatcgtacctccagcattatctcctgaatttacattaaacattggaataccatcaataacataaagtgcattatcatttttctccaaagactttgtaccacgcataactacacgagccgcagccccagcaccggctgaagaagcatttattgttacgccagctacttttcctgataaagcattaataaagttagcatcctttatattagtcaattcatctccctttacttgctgtacattataactcaacgctttttgttcacgtttgatacccaacgcagtaactactacttcgtccaaggtttgcgtgtcttcacccattgtgacttttaggggttgggcgttggcaagcgtgattgattgggaggcataaccgatataggagatttctaacacatcacctttggcagcttgtattttgaaatttccatccatatcagtaatcgcaccagtagctgttcctttcaccagaatgctaactccaattaaaggttcaccttgtgcatctgttactgttcccgttgcaacgattggtgtttttttctgttgttctacttctttcttagtagaaagtacaatatgcttatcgactattgaataactgatatttgttcctttaaacagctgacccataacgttagtcagcgactctttagaaactttaatagatatgacacgattaatatcgacgtcatttgtgttgtatactactgacattgaagtttgtttctctatctctttcaatgcagtatttagaggtaccttcgatagattaagggtaatcattcgttcctgcccataagctgaggcaaaactcgaaaacaataaaaggaaaaataacaagtatggaaacttgtgttttataatttctttcatcttattctttttaattagaaatagtttttaggtagttaacaaacatgtgcgggtaataaatataaccgccactcatacaaaggatctatgtatctctgtttctcatatttataaatttaaaggttacactaaaaatgatttttcataagcgcttattcatcagtaatacatttgatactgcaaccatactaaacgaaaataagattttttttcgtaaaaaatggttagactaagcatttttttgaaaaataaatacataatcatttgataaatagagcattaagtagttctgaaaaactattcaatttattacatttgcatgcaatttgcatatattcaaataacagatagatataaagaatcattttatgttcaaatattcaaaagatggagtttctgtattgaccatattagacaccagaagggctaaaattaatggattatttccagttaaagttcaagtcgtatttaggagaaagcagaaatattattctacggggaaagaattgtcaaaagaagactgggatagattgttaaaggcaaaaagtcagttattaatggaggtaaggactgatatcgaaagtagtttttctattataaaacagcaagttagcgaacttatccaaaaaggagaatttagttttgaaatattgagtatcagacttggaaggcatacgaaagaaatcaatctgcgtacagctttcgaattaaagatgaaggaattagaggataatgagcaggcaagtacatatttaaattatcgaagtgctttgaagagtttagaatgttttggtggtaccaatattccattagacagaattactgtggagtggctgaagcactgtgagcggttttggatttctaacggtaagagctattcaagtgtgagtatttattttcgaaccttaaagtgcatattaaaccgtgcagtacgagatggaatactgaaagaatcatcatttccttttggaaagaataaatatgaaataccagaaggacatggtcgaaagctggctctcactcttcctgagataaaaagagtcatgtctttccaggattctaccaatgaattagaggaatttcgtgatttatggttcttctcttatttatgtaatggaattaattttatggatctgttatttctccagtactcaaatattgtagatggagaaatctgttttatacgttctaaaacatccaggactactaaacatagtaaagaaatacgtgctactataactcctgagatgtgggatatcattcataagtggggaaaccctaatataagcccacaaacctatatttttaaatatgccaaagggaatgaagatgcttttgaaaagatcaaattagtgcgtcgtatcgttactaaatgtaatagaaaattaaaaaaaatagcccaaggtacaggtattgctcaactgactacttatacagcaagacattcatttgcgacagtactaaaacgtggtggagccaaaacgtcttatatttcagaaagtcttggtcactctaatttagctgttactgagaattatttagcatgttttgaaaaggaagagaggattagaaatgctcgactactgactaatttcgataataaaatgtaaatttgaatggtgcatgcaaattgtatgcacaacgctactttttgtgtttattgcataggcataaaataaatgagtatacgataatatgatgaattatagaaaaatctcattgtgtctaatatcattacaagatatgattaaccatatggttaatcatatcttgtaatgtcgcattttataaataatagaaaacatgaaatcagtaaaatcagcacattcttaaaaaaatgcatatttaatgtgcctataatgtaatatattacactaaactatataagaattagaaataaaacctttattcttgatttgtattcaacggcttgatttaaataaacgttattaataattatatggttattaaatcgtttaaaatacaggcgttttaatataaataacaatatatagaatcatattgtcatttcagaatcaagcgaaaaattaaatcaaatagagaaaaagttctttcaaagtgcccatatttatcttggttttaaaggaactggtgtttcctttaaaaccaaaatgccgttccttttaaaccaacgactgctccgttcgtatattttaaagctctttcatagaattgaagatggcatttttatgcactaagcaattgttttatgcaaacacatcgcataatcttgcaataaattatacatttttttgctatttattagatttcatagactttgactacctggctattcttaaaaatagaacataaagaagtatgaaaacagctataaattcattactcccaagcaatcacgttgaccaatgcccagccattgaaaataacaatgggggaagatacacaaaaattggatgaagttgttgttactgctttgggtatcaaacgttctgaaaaagcacttagctataatgtgcagaaagttaacaatgatgctttaacttccgtaaaggatgctaacttcgtcaatagtctaaacggaaaagtggctggtgtgaatatacaacgcagtgcttccggtgtaggaggtagtactcgtgttacaatgcgtggtaacaaatctattagcggagataacaatgttctatatgtagttgatggtgtaccaattggtaatcaagctgacagaactggcgacggaacaggattcggaagcggcagaacttcaggtgaaggtatcgccaatttcaatccggatgatattgaaagtgtgtcagtattgactggaccgtctgctgcagcattgtatggagcaagtgcagcaaatggagtaatcttaatcaatacgaagaaaggcgaagctggaaaaatgcgtatagatgtatcttcttcagtagagtttatgacaccgctcacaatgcctaaattccaaaatagatatggaatatcaggaaactattattcgtggggagataaactggaaaatcaatcatcgtatgatcctaaagacttctttgaattaggggcaacctttaataattcatttaatctttcaaccggaaacgataagaatcagacttatttttcgattgctgctgtaaattctgatggtattgtccccaataacaagtaccaccgttacaatgtgacattgagaaatactgctaaattcttgaatgataagttgacattagatgcatctgcaagttatatacgtgagtattataacaatatgatttcttatggaacttattttaatccaattgttggcgcatacttatatccgcgcggtgaagattttgagaaagagaagtattttgaacgctataatagtgaactcggatattctcaacagcaatggagtcccggagattttggtatggatatacaaaatccatattggattgcctatcgtaacattcgtccggaagtaaaagaccgttatatgttatatgcctctttaaagtacgatattaccaactatttgaatgtggcaggtcgtgtacgtttagataatacctatactgaaaaggaagataaacgttatgcatctaccataaacacatatgctagtacaaacggacgctatacatactctaacgagacgtttcgacagaaatatgcagatataatggtaaacttcgataaacagtttgctgaaatctatcatgctacgatcaatgcaggaacttctttcgaagaatatgatacaaaaggacgtggatatggagggcagttgctattagtaccgaataaatttgtatatagtaatatagacccgacgcagagcaccgcaagtcaaattggtggagacagccgcaggagaaattttgctgtatttgcttctgctgagttatcatggaattcggccttatacctaaccttgacagggagagccgataagccttctcaattggtaaacagtgatgatccgtggattttctatccttcggttggtttgtctgccatcgttactgaactgttacccaataatattaaagagaaattagagccaactttaggtttcctgaaagtcagagcttcctatacagaggtaggttcgccgatcccctatacagggttaactcctggaactctcactcacgaacttgaaggaggaacctttaaaccttttaaatattatccgatttccaatctgaaagctgaaagaactcgttcttatgaagtaggtcttgattccaaatggtttaataatacaataactttcggagttacgtattatcattcaaatacatataatcagttactgaaagctacattgggtagtaattttgaatatatgtttgtacaagccggtaatgttcagaatagaggacttgaattaagtttaggatttgacaagaaatttggtgattttaattataatacaacgttcactgcgacgacaaataaaaataaaataatccaattggcacgtgatgtcttgaatccggtaacaaataccttgatagatttaacggatattcaggttgggcgtttccgtttgagagaaggaggagaaattggtactgtatatgcaaatgaatggctaaaaagagatggtgataattatatagactatcagccaggtcaggcattaactacagaaaccacctcaccctacaagctaggtagcgtgaaccctaaatggaatttgggatggcagcatggatttagttacaaaggatttaatcttaacttgttgttcacagctcgtattggaggaatcgtaatatctaaaacacaagctatgttagacagatatggagtatctgaagcatcagcagatgcacgtgatgcaggtggtgtatcattaggatatttcaaagttgatccaaaaacttattatgatgcagtttctaatttggatgcctactatacatactcagcaactaatgtgagattgcaggaagccagactaacttatactttccccaataaatggtttaaaggaactgttaataatttgagcttgtcagtatacggtactaatttatggatgatatacaataaggccccttatgatcctgaactaacagcttccactggtacttttggtcaaggatacgattactttatgttacccagccagtctacttatggattgagtttgaaatttggattctaaaataaataaaggaattgaatatgaaaaaatatataattctgcttttggcactttgttctatgtcagcttgtgattatgaagctgtcaataccaatccttacggtgtctccgatggggaattaggtcctcttaaatatggtgcccgtttcatgaatatgcagcaaagagtgatccctataggttcacctagtttgacaactggacctggaaatgatttacaaaatactgatttgatatcttccggtaactatattggttattttggcaataataataattggggatttaataatgaggctaattggaattttacagatagtagaatgaattatgcatatcagaacttttactcgcaaatctttttgccctggaatgaaatatatgaaatcgctaaagattcggattccccatcagaacaagctatattggagattgctaatattgtcagaaatatagcatggttgcgagctacagacgttttcggtcctattgcttataactcagcaggtgatggaagtattgcgccaaaattcgacagccaggaagttgtttacagaagcatgctggctgatctgtcaaaatcagtagaattgctgaatacaatatcttatagtgtgatggctcagtacgatttgatatacaatggcaatgttcaaaactgggtaaaactggctaactcattaatgttgagaatagctgtcagagtacattttatagatgagactttggctaaagaatatattacgaaagcattagatcctaaaaatggcggtgttatcgaagatatttcaagtgaagcaaagatcaaaagttctgataaaatgccattgctgaattcaatgttagcatctgtcaatgaatataacgaaacaagaatgggcgccactatttggggatatttggatggatataaagaccctaggttaagtgcatattttactgaaggaacatatggttctggcagttgggcgcaaacaggttattttccggttgcaccgacgaatagtaaatctaaatcggaaacctcatattctgcaaaatttgcatcgcgtccgaaagtagattccaattctcctttatattggttcagagcatccgaaacttattttctgaaagcagaagctgctctatacaatttgataggtggtgaccccaaaacgttctatgaacaaggaataaatatttcatttcaagagcaaggagtcagtggagttgccacatacctgtcaggaacaggtaaaccaaccggactcactggtagtaattacaaatatggcacttataaccatgatttaagcattggaaatacttcacccaaatgggatgattacacaggaaatttgagtaagcaagaagaacagttacagaaaattattacgcaaaaatatctggcactatatccgaacgctgtggaagcctggaccgaatatcgcagaaccggtttcccatatttaatgaaacctatggatgaagctgctcctggaagaattggcgcctcaatagaagattgcagagttcctgaacgctttagatttgctcctacagcctataattccaatcctaatatggctgaaattccaacattgctgggaggtggagatataggagctactaaattatggtgggtacgttcaaacaggcccaaacaacctaatcagtaataatgatattcatttttaagaaaagaaaattatgaaattattaaagtatttgtgtataggtatatctgccttaagtatactaagctgttctgactggacatctgaagaaagagaggtttttgagaatcaagaaggaatgcaccgtctgattcccctaatagaagcccaaaccgaagaagatcttacaccgaccatgcgtgaatatttcgctcaaataagagaatatagaaaaactcctcatgtgaaaggctttggttggtttggtaactggactggaaaaggaaacaacgctcaaaattatttgaagatgttacccgatagtgtagattttgtatctctctggggaacaagaggttacctttctgatgaacagaaagcagatttgaaattcttccaggaagtgaaaggaggaaaggcattattatgttggattattcaagatttgggagatcagctgactcctaaaggattgaatgcaacgcaatattgggtagaagaaaagggacaaggaaacttcattgaaggagtaaaagcatatgcaaatgctatttgtgatagtattgaaaagtacaatcttgatggttttgatattgactacgaacctggatatggacattccggaactttagcaaactaccagacaatcagtcctagcggtaataataagatgcaggttttcattgaaactttaagtgcccgcctacgtcctgctggaagaatgttagttatggatggtcagccggatctcttatctacagaaacttcaaaattggttgatcattacatctatcaggcatactgggaatcaagtactagttctgtaatttataaaataaataaaccgaatctggacgactgggagcgtaaaacaattattaccgtagaatttgaacaagggtggaaaactggtggtataacttattatacaagtgtacgtcctgaattgaacagcatggaagggaatcagattcttgactatgcaacactcgatttgcccagtggtaagagaataggtggtataggcacttatcatatggagtatgactacccgaatgaccctccttacaaatggttgagaaaagccttgtattttggtaatcaggtatatcctggtaagttcgattaatattaaagaatgactattatgaaaaagaatatttatttagctgttctgttattcttaacaggttgtcaaaatgagttatataaaaatcctttggatgattttcaaagtgagcaaggagtatatatagctaataacggcgtattacaaagctttgtggaagaaggcaaagatgtggaaattaaagggctgcaagtagctttagctgttcaagatactaaagaaataaaagttacattggaggctggtaatcaagctcagttagatgcttataatgctaaaaatggaactaactatatagtacttcctaaagagatgtatgagatctcacagaaaataacatttatgcctctttatgcaatgatggatgttcctatttctttgaagaatgtaaaattctcactagaaggtaactatgctttgcctatacgtattacaggaggtgacgtgaatattatcagagggcaagaagagactttacttgtacttgagcaaagagtgaatacaaaagcgctccggataagtacaagtggaagtggttcggggagcgaggatgataaaatgttccctaacgatttcaaagttgatcaatggacaatggaagttatggtcaacagggctagttacaaaagtaacaatcgttctatttgtggaactaaattggttgccaatgctggtcctatggatgagatttatactcgtttcggtgatgtaactattaaccctaatcaattacaaattaagacgggaagctctcagattgatgttcccgctgacaaattctctgcacagcctgacacttggtatatgttagctttcgtatatgatggtcaaaaaaattatgtatacgtgaacggagtgctggttgctgaccgggaaatcagaacaggtccttatggattgattggcttttggattggtggttcaaacgagctgattcgtgaggttcgtttttggaaaacggccagaacttcgcaagagatagcttcgaatatatggaagatggtaaatcctgacgatgacaatttactgctttattatccattgaatgggaagaagagggatagtgctaccggagaaattacagaggatgagactctgctttgggactggagtaagaatggtaagaatttacccaagccatcaagttattcttttgatgataacaaagggaacgggtttatattcccaccgcaagaatagcaacaaactacaataaattgtacatatagaaaaggctgcctttggaatgaggcagcctttgtttttactatacattgtaaataataacaacataaataaagagacagaactatccactcaacaattcatatatttacacaaatatacaaattatcaaatacaaatatcaatggttatatttagtatgagatgttcttctctcatactactccgcatatctcccaatcaatcacgcttgccaacgcccaacccctaaaagtcacaatgggtgaagacacgcaaaccttggacgaagtagtagttactgcgttgggtatcaaacgtgaacaaaaagcgttgagttataatgtacagcaagtaaagggagaagctttaacagcggtgaaagatgccaactttatcaattcgcttgcaggtaaagtagccggtgtgcagataagcagcggtgctacaggtgccggtggtgctacacgtgttgtaatgcgtggtatgaagtcattgaccaagaataacaatgctttatatgtgattgacggtgtacctatgtttaacacaggttcaagtggtggtgacggtcagtacggatcaatgggtggttctgatgcagtagcagacttaaacccggacgatatagaaagtataagtatgatgaccggaccgtcagctgctgccctttatggctctgccgcagccaatggagtagtcctggttaacacaaagaaagggaaaaaagaaaagatatcacttactgtttccaatagtacgaccttctccaaggcatatattatgcctgagatgcagaacagatacggaacaagttcaggcttgttcagctggggagatctgacagataaaagatatgatccgaaagacttcttcaataccggtagtaatattataaactccattacattatcgacaggaagcgataaaaatcagacttacttctcagcttccacgacaaattcagatggtattttaccaaataacagctacaaccgctataactttaccgcacgcaatacaactaacttcctgaatgataagctgacactggatatcggtgcgcaatatatcatacagaataataccaatatggtatctcagggacaatattacaatcccctacccgctttgtatctgtttccacgcggagataattttgatgaaatccgcctgtacgaacgttacgatacaaattacggatttatgaaacaatactggccttatggcgacggcggactgtctttgcagaatccttactggactcaaaaccgcatcagacgtacctctgacaaaaaacgctatatgctgaatgcctctctgaaatggaaagttacagactggttaaatatcaccggacgtgtcaatttggacaactcggattatcgtaacaaaacagaaaaatacgcttcaacacttgccactttctgctctgtcaatggtggttttgaagatgctatgcgtcaggaacgttctttatataccgatttaatggctactgttgataaaacattcggagatttccgtctgaataccaatataggtatgtcactttatcacacttccatgcagacaatcggctttgctggtgacctgattatacctaacttctttgcactgaataatattaattacgctgcaaactataaaccactaccggacggatacgatgacgaagtacaaagtatattcgctaatgtcgaattaggatggagaagtcaactttacctcacgttgaccggacgtaatgactgggattccaaactggctttctccaatcagtcttcatatttctacccttctgtcggcttatcggctgtactgacggaaatgttcgctctgcctaaaatcatatcttatgcaaaagtacgtggttcttacacagttgtagcctcttctttcgaccgctacctgactaacccgggatacgaatataacagccagactcacaactgggcaaacccgacagtttacccgatggacaatctgaaaccggagaaaaccaaatcatgggaaatcggtctgaacttgaagttctgggaaaaccgcttcaatctggacgcaacctattatcgttccaatactttaaaccagacatttaaagtagatattccctcttcctccggatataataaggcaatcgttcagactggtaatgtacaaaaccaaggaatcgaactggcgctcggcttcaccgacgaatgggcaggattcagatgggcatcaaatgctactttcactctgaaccgcaacaaggtaaaacgtctggcaggcggtagcaccaaccctgtaacgggcgaactgatcgatatgccaaacatgcctgtaggatggcttggtaaagagaatgtagctccccgagtaatcttgacagaaggaggtacaatgaccgacatatacgtgtacaatgaattaaccaaagataataacggaaatataaaagtggatgctcagaccggaggacttagtatgcatacggcagagactcctaccaaagtcggaaatttgaacgccaactataatttaggctggaccaacaatttcacttacaaaggaatcaatctgggagtcgtactttccgcacgtgtaggtggtctggcatactcagccacgcaaggtgttctggactactatggcgtatcaagtatcacggcaaatgcacgtgacaataaaggtgtaccaatgaataacggaaaagtagatacacagaaatactatcagaccatcggtaccggtgaaggcggttacggaagatactatttatacagtgccaccaatgtccgtcttcaggaactcagtcttagctatacacttcccaagaaatggctgaacaatgtagccaatgtaaccttcgggcttgtaggacgcaacctgtggatgatctattgcaaagcaccgtttgaccctgaattgtctgcttctacatccagtaattactatatgaatgtggactacttcatgcaaccgagcatgcgcaatataggatttaatgtaaaagtacaattctaaattaatgagaaaattattatgaagaaatatctaagaaatataacagtcggtactgctttggtattagttgccgggagttgtaccggtaattttgaagaatacaacaccaatcaattccagattcatgaagctgacccttctactttgatgaagtcaatgattgagacgatcgtaaacattcaacagaatgactcgcagatgatggatcagatggtcggtcagttaggaggctatctgacatgtgcgaatgtatggagcggcactaacttcggcacattcaatcaaagtgatgcctggaatgcaggtccctggaatactaatttcgagaaaatatacggtaatttcttccagatacaggaagcaactaatgaaagcgggcactattatgcttttgcacgtatgatacgggccataaccatgctgcgtgttgccgattgttacggtccgatgccctacagtcaagtgaaaaaaggtaacttctatgtagcttatgacacagaagaacaagtctataagaatataatggaagattttgcaagcgctgccaacgtactctataactattacaaagataccaatggtaacgcaccgctcgccagcaacgaccctgtattcagcggcaattatgccaactgggcaagactcgcaaattccatgcgactgagggtggctatccgcatcagtacagcatatccggagatggcaaaagaaaatgcggaagctgccgcatctcatgaagccggactgatcgaagcaaataatgacaatgccatgatggattgcggctcgcagacaaacccttaccaattggcagctgtaagctggggtgatttgcgtgtcaatgccaatatcgttgattatatgaacggatacggtgatccgcgtatgtctaaatacttcaaccattcaacattcactggtcacactcaggaatatgtgggcatgcgctccggagaagatggttttgccaaaagtgacgttgcaggttattccataccggccatcacaggaacttcaaagctattggtattctgcgctgctgaaacagcattcctccgtgcggaaggcaaactgaagaactggtctgtcggcaataaatcggctaaagagtactatgaagaaggaatcaaactctccatggaacagtacggcacaacaatgcctgacaattatctgacaaaaaccgaaaaaccgacagtatcacataataatgatcccagaggccatgcatataccatctccaacaccgttgccgttgcatggaatgacaacaatgaagaagaaaatcttcagcgtatcattactcagaaatggatagccaactatccgttgggactggaagcatgggctgaatatcgccgtaccggttatccggaactctatccttgcatcgacaatctgtctccatcaggagtagacagcaagcgtggtatgcgtcgtctgagattcccttacacggaagtacagaacaaccattccaattatcagcaaggtgtttcgtatctgaaaaatggtggtccggataatgaagccacagatttgtcgtggggaaaaactaattaatataacctcctaactagaattaatatgaaaaagaattatttactatattttttattgttagcgttgagcaccccaatatgggtgagctgtaatgactggacagaatcagaagcaaaagattacttcgaaggtccttcagaagaatactatgcagccctgcgcgcatataaaaagtctgatcatcccaaagctttcggatggttcggcaactggacaggcgaaggcgcttcattagtaaacagcatggcaggaatcccggatagcgtggatgtcgtttccatctgggggaattggtcgaatattacagaagcgcaaaagaaggatctcaagttctgtcaagaagtaaaaggaactcgcttcaccatgtgctttatcatcacttcggtaggtacacagatcactccacaacatatatatgacaattgggagtcaatgggattcgcaagccaacaggaagctgttaatgatttctggggctggccttcggacgagtctgataaagaagccgtcgaagcatctatacgcaaatatgcaaatgctatcgctgatacgatcaacaaatacggctatgacggattcgatatcgactacgaaccaaactatggtaataaaggtaacattgtggacgacgatgacagaatgttcatattcgtagacgaacttggcaaacacttcggtcctaaatcgggaaccggcaagttattgatcattgacggcgaaccgcaaagtataaagaacagacccgatgtaggcccttactttgattactttatcattcaggcctataaacccggtaatgacaacaatctggacaaacgcctgatagacggtggtgtagcaggtccgggactcgttcagacttacggtagcgtaatgtccgaagagcaaatcacaaagatgaccatcatgaccgaaaactttgaggctgtagatgctgctatggatggcggatatccttataccgaccgttatggcaacagcatgaaatctttggaaggaatggcacgctggcaaccgaaaaatggtttccgtaaaggcggagtaggaagctatcatatggaagcagagtatccgacaaatccggaatacaagaatctacgcaaagctatccagattatgaatccttctaccaaaccgttaattaaatattaattcactatgaaacagattaaaaacataagaaacttcttgttgatatcgcttatcgcaggcggtacatggatcggctgtgacgatgcgaattatagtacattggacacgcacgtcttcttcgaagaagctttaactgcaacaagcaccaaagtgactgttatgggcagcggtgaaaccaatgtcacactgaacgcgcatatcagcaatacacaacagaaagacaacagctatagtctggcaatagatcaggctgctcttgacgcatacaacaaggctaatggtacaaactacatcgcattgccggaaacccattacacccttccggacaatattacgattaaagcaggcgcttataatgcagatcccatttccatacatatcaaagcattctccgaggaaatgaatgcatccggtgaatcatatgctttacccgtacgcctggtagcaaaacaaggtagtattgatgtaatgcctgttaccggtagcttggtgattcttgccaatagtatcatggaattttccgccccgcaatttgtcggaagtacagaactcgtagcccagaaattctctgaagctcctgaaacctacaacgagtttactgtcgaagttcgtttccaggtaagcaatactgccaatcgtaaccgtgcagtattcagcacatccggcagcgacggcaagagcttgttattgcgtttcgaagatccgcaaagcgacaatagtgaccacaaagctcactcattagttcagattcagactcatgaaacctatctgaatccgacctactctttcgaacctaataagtggcaacatcttgctgtgacatacaacggttctaaatatcgtatctatattaacggtaaagacggaggttcaaaagacgttgccggcgggccttgtatatttggtaatatgagttggttcagtggcggtagctggtggagcggatgtaaaatcttggtaagtgaagcccgtatctggtctgtatgccggtcggaaattcagattcagaacaacatgactatcacaagtccaaaatctccgggattagaagcttattggagattcaatgaaggtaaaggtaatgtatttgaagatgctaccggtaaagggcatactattaccacaacagtcactcctgtgtggatagataagattctgtctacagatgaagctactccatggaaataaaatgatggtacaattttaatatagttactatgaataaagtatttcaatcaataatcattacactcatgagtgcaatgatccctttcttctcatcttgcagcgatgatgattcggtcaacgaatgggatatgagctatgtttctttattgccggcagattatttgagaccgactccttcgtttacactaaagcatgtggaagaagaaggtattgaaggcagtgttgagtttcagtttatggctacaacacaaaaagctgttgcccaggatataaatgtaaatattgacgctacctgtgatggaatctcagcagataagatcaacttaacttccaaaacagccgtaataaaggcaaatgctacagcttcagaacctattaccttaagtattacggactgggatgagttggaaagtatcaaaggagaggcaaactatactctgagaataaaaataacaggtatagaatcaacagcaacagatgttgccaatgcagcatactatcaggagatagtgctgaaaatctctaaaagcgctgaaaggaaaaaggagaatgtactgctcaccaatgctaaagactggatcttcacctttatggaaggagtagaaaatcctgaatcaaactcggtcgcaggaacaggaagcagtgatgttgcgaccaacggaatacctttctggttgactgttgacctaaaaacagtgaaaactctgacaggcattcaaaccagacattggggagctggatatgctcctacgaaagtcgagatattcacatctgaagatggcgaaaaatgggtatccatcggtcaatggactacaaagggaggaactcagactatcacatttgaagaaagtgtcaaaacacgctatctgaagtatcagatgatcactgttcccggtcgtgtagatattacaagattctatatatattcttgggaataagtgtatggaataagttttccatcaataaaataccggacaagagcagacttacaagaaaaatgtataagtttgctcttgtttttatatagagctacaatccacctttagcaaacataaattagataaaatgaaaaaacatcatctattaggagtcattcttttatgcagtggactattttcctgttcttcaggagttattcagcaggcaaactacgaagttattcctctgcctcaggaaatcaaaattacgaccggaaactttgtactaaatgaccgtacttccatcgtctatccgaaagataacaaggaaatgcagcaaaatgcaaatctgttggcggaatacattcatcagatgtccggcaaaaagctgaaagtcactgacgagccagtcacttcaaacgcaataatcttagcaacaggtctgaatgcagacaatgccgaagcatatcaactaaaagtaacccaagacaacgtaaccatcacaggtacttcagaagcaggaactttttatggcatacagactttacggaagtcactcccaattacaaacaaaggagacataagccttcctgctgccgaaattaacgactatccacgtttctcctatcgcggagtacatttagatgtttcacgccatttcttcccggccgactctgtcaaacactttattgatatgatggctttacacaatatcaaccgtcttcattggcatctgaccgatgatcagggatggagaattgaaatcaaaaaacgtccggagttgaccactatcggttccaaacgctcggagacagtcatcggacataattccggagaatatgacggcattccctatagtggtttttatacacaggatgaagctagggagattgtaaaatatgcaaaggaacgccatatcacagtaataccggaaattgaccttccgggacatatgcaggctgcgcttgctgcttaccccgaattgggttgcacgggcggcctctatgaagtatggaaaatgtggggagtatcagaagatgtgctctgtgcaggaaatgacaagacactgacatttatagaagatgtcctgaatgaaattgtagatattttcccatccgaatatattcatgtcggtggtgatgaatgcccgaaggtacgttggaagaaatgcccgaaatgtcaggcacgtatcaaggaactggggctaaaagccgataaaggtcacacagccgaacaaagacttcagagttatatcataaattatgcggaacagtttcttaacggcaaaggacgtcagatcattggctgggaagaaatactggaaggaggactggcacccaatgccactgtcatgtcatggaggggcatagaaggaggaattgaagcagtgaagcataaacacgacgcaatcatgacacccagttcattcctgtacttcgattactatcagaccatggatacagacaatgaaccgcctgctatcggagggtatgtacctttagaaaaggtatatagctacgaaccggttcctcagatactcactcctgaagaagctaagcatatcgtgggcgtacaagccaatttatggacggaatatatccctacttatagtcaggtagaatatatggaactaccccgtatggccgcattatcagaaatacagtggactatgccgaagaaaaaagaatatgcggatttcctgaaacgattgcccggactgatcgctgtctatgacatcaatcaatataactatgccaaacatatcttccaggtaaagtcccaatatatccctgataccgaagccaacgtattgaatgttgtcttatctactattgataatactccggtctactatacactcgatggcagtgaacctacagccagttccaatatatacacggacacgctgaaaatcggtcaaagctgcacactgaaagcaatcactatccgtcccaatggcagtagtgctgtgttgaaagaggatatcaaattcaacaaagccaccatgaagccgatcaccatgcagcagcccatcaatgaaaagtataaattcgaaggaaagaatacactcattgacggactggcaggaagcagaaattaccgtaccggacgatggattgccttctatcagaacgatcttgaagcactgattgacctgcaacaggagactccgataagcaaagcatgggtacgcacctacgtagaaataggagaagaaattcttgatttacgcgaactttccgtagccgtatcaaacgatgggaaagagtacaaagaagtaaaatccgaagtttaccccgccgtcagtaaggaagataagaatggcatctatacccatgaactttctttcgatacagtgcaggcacgttatgtgaaaataacagcccgtccggaatataacataccggcatggcattggggtaaaggaagaccggcatttatattcgtagatgaaatagggctggaataaaacttaaaaaggtatgtcgctgggcgacatacctttttttaaggcactgtccacaattttgtgtaaatagaaaacttcaggattcgggttttatacttgaatcctgttttcaaatatagtaataaattggttaaatatcaatgcccaattccaaataggttggtaccatttcttttcgatttcgttaatggccagatagacagattttttcagtgcatcatcatttggaaacgatagcttatttttggtgtactttctaattttcccattcagattttcaataagattagtggtatagatgatctttctaatctcgacggggaaatcaaagaacacggtcagttcttcccaattatttctccatgagcgtatcgcatatggatatttagcaccccatttttgctcaaagttatccaactccatctcagcggcttctttagtaggtgcattatagatgttctttaaatcggcagtgaattcctttttttctttccagacgacatagcgacaggagtttctaatttggtgtaccacacatatttgagtagtagaggcaggaaatacactcttgatggtttccgtaaatccattcaggttatcagtaactgtaatcagaatatcttctacaccacgggctttgagatccgttaaaacgcccatccagaaagcggcactctcatttttaccaatccacatacccaatacttctttcaagccttccttattcagacctacacataagtaaacagtcttgttgatcactttgccgttttctctgactttgaatacgaggccatccatccagacaatcatatataaactgtccaaaggacgattttgccactctgttgcagcctggctaactttattggtgataatggagatagcggaggtagagaggttaataccgtatatttcctgcatttccgactcaatgtcagcgacgctcatacctttggcataaagagagatgacaagacgctcgatagataagccgcgggattgatgcttgggaacgacaataggctcaaattcaccttcccgatcacgaggaacctgaataacagattcacccatctcggtttgaatctgcttcctataactaccattgcgggagttgccactatgatctccttgattggagtgtttttcataacctaaatggttatccatctatgcttccagcatttgttcataaacacgagtatgaagctctttcatgaaagcagtaacatcttcgccagtcttaaactgggacagaaactctttacttaaaaattctttaggaatgtccataaaatctgatttttacaaagttaatatataaataaaaaaactacgagagaaaccccgtagttttctatttacacaatcagatggatagtcccttttttaacattctctttatcctctttattttttagacaatcgaataatccgtccttccttcttatagctgaagtgatttgtatgcatcaatacattcaatatttcgtccggaagattatcagtagagaattcaccggtaaaccgttcggtcttcagactttcgtcatcatacacaaacttcaagtcatacagtttctccataatatttgtaatctccagcaatgaatgttgcttaaatttcaattttccgttaatccacagaagaacttcggtcggctcggcatattctattaattcagcctgataggtcgttgtattaatgttcaacgtttgtcccggtttcagcagatagccattattgacggttcgcggagattccattcgtacagaaccttgtaacagagtggtcactaccctgtcctcttcttcacgtgcccgtacattaaactttgtacccaatacacaagtcttaatatgcttcgtatttacaatgaatggagcatgcttgtcacgagccacttcaaagtaagcctcacccgacaaatcaatctgacgatccgtactccagaaagagttacggtaaataagcttcgtagatgcattcagccaaaccttactaccgtccggaagcactgtttgcgctctctgtccaccggtagtcatcactgtataatcagaaagtttattggaaagcaatccccacgcaattccgcctgcgaaaacaagacctgccagaaaagcggctgccgcggacgcataacgtccccatcgaaccgatatacttcttcgcttggcttttttctccttttcacgtacgagcgacttaaacttcgtcagtgacgcttctgtgtctacagcatccatcactgccatacggtcgcctacaaaaagggtataatatagctgctctagtatttgtcggttttccggtgcttcttcacaccatagttctacctgctgacattcttcgtcattgcatcctcccctcaggtagttcatcaagatagattcatccatgttcaatcatccttttactataaaaaaatataatacctctgttattaatacagttggcagcgcaaatatactaaactaaaaaagaaaaaaatattttctcccgttttatttcgtttctttcattgctttcattatttttgctctgcataaaaaataatgaagaatgcaacaacctcctatatacctagatattaacaataataaatctatcatcaatgccttgaaagcaggcgaagaatatgtattcgacgctgtctacaggcattatttccgtagattgtgcgccttttgttcgcaatatgtcagcgagcaggaggagattgaggagattgtacaggacacgatgatgtggttatgggaaaaccgctgtaaccttatggaagagcttacattgaaaacgcttctctttactattgtcaaaaacaaagctctgaaccgtatttcccatttcgagatcagacgaaaagtacatcaggagattacagaaaaattcgagaaagaattcgacaatcctgacttttatctggaaaatgagttgttccgcctttatgagaatgctctgaaacagcttcccaaagattatcgggaagcatacgaaatgaatcgtaatcaccggatgacccataaagaaattgcagaaaagctgaacgtctctccccaaaccgttaactatcgtatcggacaggctttaaagctattacgcattgccctaaaagactatttgcctttatttattctttatttcgggcttgacatattcaaacaatcatgaaacaattcatatcaaaagcatgagtgaactcctagtctataaagcctcggcaggttcaggcaaaacctttacccttgcagtggaatacataaagttgctggtactgaatccacgtgcctaccgacagattctcgctgttacctttaccaataaggcaacagcagaaatgaaggaacgtattctcagtcagctatacggcattcagatcggtgacaaagattccgaggcctacctgaaccgcatcaaagaagaaacaaagaggacagaacaggaaatacgggaagccgcaggaatcgccctcggatatatgctgcacgactacagtcgtttccgtgtagaaaccatcgattcttttttccagtccgtcatgcgcaatctggctcgtgagctggaactcagtccgaatctgaatatcgaactgaacaatgcggaagtactcagtgatgcggtggacagcatgattgagaaactgggtcccacctctcctgtcctcgcatggctgttagactacatcaacgaacgaatagctgatgacaaacgctggaatgtatcggatgaagtcaaaaatttcgggcgcaacatcttcgacgaaggatatatagaaaaaggtgaaggtctccgccagcgcctccgcaatccggataccatcaaagaataccgcaagcagctgaaagctttggaaacagaaatcctggagcaaatgaaaggattctatgaccagtttgaaggagaactggaaggacacgcccttaccgcagatgaactaaaaaacggttcacggggaatcggcagctatttccgtaagctgaacaatggcattctaagtaatgacatccgcaatgccactgtagagaaatgcctggaagatgccaaacactgggctactaaaacatctccacggtttgccgatattattgatcttgcgaaatccagcctgatgcagatactggaggatgcggagaagctgcgttctaaaaacaatctcctgctaaatagttgccggctttccctgcagcatctcaacaaggtacagcttctcgccaatatcgacgaagaagtgcgacagctgaaccatgacaacaaccggttccttttatcagataccaatgccctgctccatcaactggttaaggacggagattcctctttcgtgttcgaaaagataggaaccaacatccgcaatgtcatgatcgacgagtttcaagacaccagccggatgcaatggggaaatttcaaactgctcctgctcgaagggctttcacaaggagcagacagcctgatagtaggagacgtcaaacagtccatctaccgctggcgaaacggtgactggggaatccttaacggtctgaacgaccgcatcgagcatttccccatcaaggtaaagaccttagccaccaaccggagaagtgagaccaatatcatccggttcaacaaccaaatattcactgctgccgtaaattacctgaacgaagtatacaaaaaacagttgggcaaagattgcgatgatcttcagaaagcctatgccgatgtggtacaggaatctccgcgaagtgtacagaaaggatatgtcaaagccacttttctggaaccggacgaagcgcatgactatacagaccagacgctgataagtctcggtgaagaagtagagcatctgctttcttccggtgtacggctgaatgacatagctatccttgtacgcaagaacaaaagtattccccgcatcgcggactacttcgacaaagagttacattataaaattgtatcagacgaagccttccgcctcgatgcctctcttgccatctgcatgatgatagacgcactgcgatttctatccgacgagagcaataaaattgcacgggcccaactggcaatagcctatcagaacgaagttctgcaaaagaatctggactggaacacccttctgctccttccgatagaaaactatctgccgcccgcatttcttgaaaagcagaaagaactccgtcttatgcctctctacgaattgctggaagaactattcagcatcttcgaaatgagtcacattgaagaacaggatgcctatctgtttgccttcttcgatgccgtaacggattatttgcaaagtaactcctcggagctcgacggttttatccgctactgggatgagacgctgtgcagcaaaaccattcccagcggtgaagtggaaggtatccgaatcttctccatccacaaatccaaaggattggaatttcatacagtactccttcccttctgcgactggaaactggagaatgaaacgaataaccaactggtatggtgtgcccctcaggaagctccgttcaatgccatggatatccttcccatcaattactcgacacaaatggccgaatccatctatgggaacgattatctgctggaacgtcttcaactgtgggtggacaatctcaacctgctttatgtagccttcacccgtgccggaaagaatctgatcatctggagcaagaaaggacaaaaaggaactatgtccgaactgttggccaatacactgcctgtagttgccctcaaagaaggcctcgactgggaggaagattgctatgaacaaggagaactctgtccttcggaagaagaaaaagcaaaaacttcgaccaataaactgactcagaagccggataagttgcctgtccacatggagtccatgcgtcatgagattgaattccgtcaatccaaccgctccgccgatttcattcaggggatcgaggaagaagaatcggatgaccgtttcattcatcgcggacgtatgctgcacacgctattttctgccatagaaacagcagaagatattgatccggctattgagcgcctcattttcgaaggggtcatcgccagcagcgaaaaggccgaagaaatacgggaagtagcccgaaaagcattctcctccccggagattcaagactggtattcgggggaatggaccctgttcaacgaatgtgccatcatttacaaagaaaaaggggtgttgcaaacccgacgtcccgaccgtgtaatgatgaaagacggtcaagtagttgtagttgacttcaaattcggtaaagagaacctccaatataacaaacaggtaaaaggatatatgcaactgcttactaagatgggatataaaaatatcaccggctacctgtggtacgtagatgaagagctaattgtaaaagtgaaataatgaaagccgcaccgctcataggaattagccgccatcggctcagtactgatggagagggagtcactactctagtggccttccatggttgcccgctgcgctgcaaatattgcctcaatccgcaatctctacactcagaagatatatggaagcactatgactgcgggcagctttatgaggaagtcaaacaggatgagttatattttctcgctactcacggaggcattacattcggaggcggagaaccttgtttacagagcgatttcattgatgaattccgtcaactctgtggacaggaatggcagctttccgtagaaacgtcactcaatgtagcacaagagaatatagagaaactagtacctgttgttgattcttatatcatcgatatcaaagacattaataatgccatataccaaaagtacaccggaaaagacaatgaaaaagtcctgcataatcttcaatatttgattgatcacggaaaaaacgaacaaatcattgttcgtacccccgtcattcccgcatacaatacagagaacgacgtcgattatagcatccgtttactgaaagaaatgggaatcacccaattcgatcggtttacttataaaacacctaataattgtcagccatgaaacgaggaaaacaaacctgcaggatattgaaggatatccgcagacaaatagcagaagctaatgatattgagtttattacttccgagtgtcaatatcaaggtgactgtctaggcacttgtcccaagtgcgaagccgaagtacgttatctggaacaacagctggaacgtaaacggatggctggaaaagccataactatattaggtatatctgccggactggtagcaatggcaccaatgacttcatgtagtagttctcctaataaagggactagtcaggaaactatcagtgactctaccaatgcaagtgtaatgtttggagaagtatgcccgactcctgtagaggatactatacctatggtagagaaagatacagtaaacaaacaagaattacctgaactaccccaagacatgggattaattgagattacccctatatcaggcgaaataataacagtaaaagactcgcttactgaaaaagactcgcttaccgacgtattagaagtagctgctgtcatgcccgaatttccgggaggagcacaagaactaatgaaattcattagtgcaaacatagaatatcccgaaatagcccaaggagacatgggacaaggtcgcgtcatcgttcgatttatcgttgacaaagaagggaatattattcaacctaaagtggtacgtagtgtagatccatatttagataaagaagcattacgtattgtcggtcttatgcctaaatggaaaccgggagaactggatgacggaacgaaagttgccgtccgcttcacaatccctgtaatgttcaggcaacaataaacaaatatctaagatagaaaaaacttataactgatatgcaatcatttctccaactagtcgctcatgatttatataccaagataggaaacgatctgtcccgtacagtactcgtcttccctaacaagcgtgccaacttattcttcaacgaatatctggcaggagaatccgaccaaccgatctggtctcctgccgcaatgagtatcagcgacctgttccggaagttatctgtacagaaagcgggtgaccctatccggttggtctgcgaactatataaagtattccgtgaagaaacagaaagccaggaaacactggacgacttctatttttggggcgagctgctgatcagcgatttcgacgatgtagataaaaacctggtagatgcggataagctcttcagtaacttgcaggacctgaagaatctgatggacgattatgaattccttgataaagagcaggaagaagcgattcaacagttcttccaaaacttctctatcgagcgtcgtaccgtactcaaagagaagtttatctccctttgggacaaactgggtactatctaccaccgctaccgtgagaacttagcggaactcggaatagcctatgaaggaatgttatatcgcaatgtaatcgagcaactcgataccacccgattgaaatacgacaaatatatctttgtcggcttcaacgtgctcaacaaagtagagaccaagttctttcagctattacaagatgcggataaagccatgttctactgggattacgatctcttttataccaagcaaatagtcaaacacgaagccggagaattcatcaaccgtaatctaaaactattcccgaatgaattgcccgaaagttgtttcgacactctgcggaagccgaagaacatacgctatatctccgcttctaccgagaacgcgcaagcccgctttcttccggaatgggtacaaagtactctttccactgccaacgaagaaaaagagaacgccgtagtcctctgcaacgaagccctgctgcttcccgtactccactccatcccgcaagaagtgaagaacgtcaacatcacgatgggtttcccgcttgcacaaactccggtatacagctttattaatgccgctatggaattacaaacgaacggctaccgtaccgctaccggacgtttcacctacgaaaccgtatccgctatactgaagcacccatatacccgtcagctatccatcaacgctgaacctctggaacgggaactgaccaagactaaccgcttctacccgctcccttcggaactgaaaatggatgatttcctgatcaaacttttcactccccgaagcggcatcaaggagttatgcgactacctgaccgaattaatcaaagacatctcccttctctatcgggaagaaagcgagtacaacgatatcttcaaccaactttaccgggaatccctcttcaagagctataccaccatcaaccgtctctatagcctgatagaaaccggagagctgaatgtacgcaccgacacactaagacgcctggtcagcaaagtgctgaccgcctccaacattcctttccatggtgaacctgccattggtatgcaagtcatgggagtactggaaacccgtaaccttgactttcgcaatatcatccttctctctctcaacgaaggacaattgcctaaatcaggaggtgattcttcctttattccctataacctccggaaagctttcggtatgaccaccatcgaacacaaaaatgcggtctatgcctattatttctaccgactgatacaacgggcggaaaacatcaccttgctttacaacacttcttccaatgggctgaaccgtggagaagaatcccgtttcatgttacaattgcttgtagaagggcctcacaagattacccgcgaatatcttgaagccggacaatctcctcaaggtacaacagatatcagcatagagaaaactccggaagtattcgaacgacttcgctgctcttatgattgttcgaatccccaatcgtatatactttctccttcagccctcaacgcctatctcgattgccggctgaaattctattaccgttatgtagccagactaaaagcaccggacgaagtcagtgcggaaatcgactccgcattgttcggaaccatcttccacctctccgcccaattagcttatacagacctgaccgctaacaggaaaataatacaaaaagaagatttggaacgcttgctgcgcaacgaagtcaaactacaaaactatgttgacctcgctttcaagcaagagcttttcaaggttccggcagacgaaaagcccgaatataatggcgtacaactcatcaactccaaagtaatcgtctcctatctgaaacaactgctgaggaatgacctgcaatacgcccccttcgaaatggtcgccatggaaaaacctgttgccgaaaagataacgattcagaccggtcaaggtccgatcaccctccgattgggaggaaccatcgatcgtatggatgccaaagacaccaccctgcgtattgtagactataaaaccggaggaagccccaagacgcctgccaacatcgagcaactgtttactccgtcggaaacgcgtcccaactatatcttccagactttcctgtatgctgccattatgagccggcagcagtctctgaaagtagctccttcccttctctacatccatcgggcagcctctgaaagctattcgcccgtcattgaaatgggagagccacgccaaccgaagattccggtcaacaactttgccttttttgaagatgaattccgagaacgtctgcaaagactattaaaagaaatattcgatgagaatgagcctttcacacagacagaagatacaaagaaatgtgcttattgtgattttaaagccatttgtaaacgataaaatgctgaaagaataatttataactatcaaacaaaacctgtcctgttattctgagctgtcactacttctctaaagtaatgtgcttagaaaacaggacaggtttttatcttatatcgaacttatattagctttccaacaacggaatcgagaaactgaacgtagaaccttctcctttcttcgaagtgaaccaaagctcacctccgttcttagtaacaaagtccttacagagcagcagtccgagtcccgaaccttcttcattatttgtaccgaaagtactgaaatgcgtatcggtatgcaacaatttcttctgattttcttcatcaataccacacccgctatccttcacgctaactatcgccatgctatcttcttctctcagtgataccaagacttccgatccctcgttactgaacttgattgcattacttatcaagttacggataaccgtcttaatcatatcaatatccgcacgtacttccatacgatcttcaggtatttccacagcaatgtggatattcttcagcccggctaccattgtaaagatctcgctcactccttccactacttctaccatatcgatattctggtaaacaactttcagcttaccaatctgactcttcgtccacttcaataagttgtcgagtaaggaaaatacatcctctgttgtctgattggccattgtcagcagttcatacatttcagagccgatagtttcactcggtaggttcagaatcagcatattgagcaccatcttaatagagcccataggcgaacgcaggtcgtgtgcaatcacagagtagagtttatcacgtcctatgatagtcttgcgcaactcttctgtttgtgctatgataattcgtttggctgccaccaacgagatctgatgcgttacacgaataatcagttcctctttattaaacggtttggaaataaaatcgttaccgcccacctgaaatcctttcacgatatccgccgtactattcaaagcagtaagaaagatcactggaatttcgctcatttcttcatcggccttcatttgctgggctacttcgaaaccgctgatatccggcatcatcacatccagcaacacaagatcaggtttttctttcttcacctgctccaaagcctgagttccattgcctgctgttacaatattgaacttctcattggtcagaagcaccttcagcagaaggacatttgaaattacgtcgtccacaataaggaccttatattcggaaggattaatttccacattcatatcattctattttttatgttacatcagacatttttaaaatactcaatcatacgcttcagcccatcttccagctcgacggtaggctgccatcccagtttctcttttgccagttttatatccggctgacgctgtttcggatcatcggtcggcagaggtttaaaaactatcttcgaagtagagccagtcatccggatcactctttccgccaattcaagaaccggaaactcattcggatttccaatatttatcggacccgtaaagtcatcctccgtatccatcatccgcaccattccttctatcaggtcatcgatatactgaaaactgcgtgtctgtttcccatcaccatatatcgtgatatcttcattattcagcgcctgtatgataaagtttgagaccacacgaccatcattaggaagcattctcggaccataagtattaaagatacgaatgatcttgatgcgagtctgattctggcggtagtaatccataaacaaggtttcagcacatctctttccttcatcataacatgagcgataacctaccggattcacatttccccaatagctttccggctgaggatgaataattggatcaccatacacttcgctagtggaggcttgcagtattttggcatccagtctcatcgccagtccgagcatattgatagcccccatcacagatgttttggcagtttgaatcggatcatgttggtaatgaatgggtgacgccggacaagccagattgtaaatttcatccacttcggcagaataaggataagtaacgtcgtgtcttacaacttcaaaatgatggtttcccatcaaatgctttatattgtccttagaacctgtaaagaagttatccaaacatataacgtcgtgtccttcatttacaagtcgagtacaaagatgcgagcctataaatccagccccgccacttaccaatattcttttcatcttctaattttaactattgtttttcagagaagagaacttccccgtcttgtttatagaggcaaatgtaaacgatttgctcataatatacaattttaaaggtggatattttttaagaaaagcaaaaataaaatagtttcagtttccgaaacaactttcctgtgtcaagtgttattaatagaaacaaaccactaattcaataggattatgataatgaatgaacttaatacaaacctgatagaagcggccaaagaaaagttccctgcaaaaggacaattggcaaatatattaatggataccctttatatgggcaaggaagctatctaccggaggctgcgtggcgaagtcccctttacatttcaggaagcagccattatttcaaaagaactggggatatccctggacagaattgccggagttagcttcagcaacaatgcaatgttcgatatcaatgtagtagatcatggcaaccccttcgaaacttactatgatttcctcaacaagcacgtcaagttattccatacgctgcgggaagatccgaatgcctcattaggtacagcctccaatgtaattccgcagacactatatctgaagcacgaacttctggccaagttccgtttcttcaagtggatgtatcagaatgaacatattaagtgcaaacatttcgaagaactggagattcctcaaaagataatcaatgtccagcaagattttgcgaaactttcgcatcatattcattctaccgattacatttgggacagcatggtttttcttcatcttatcaatgatatacagtatttttccgacatacatctcatttcagacgaaatgaagcaaaatctgaaagaagaattgctgatacttacagatgagttggaaaggcttgctataaaaggaaagacagactttggtaatgatgtgcatatttatgtgtcacaaatcaacttcgaggcgacttacagttatctcgagacaagtacactacaacttagtctgatacgtgtttattccattaattcactcactacacaggacgttcagatgtttcaaagtctgaaagaatggattcagtcattaaagaaattctctacactcatctcagaaagtggtgagatgcaacgcatccaattctttaatcaacagcgcgaaatcattgatgctctatagagttcttcctaatttcgataatcgaaactaactgaattttataattccaaatcatgaaagtagacaagcttattgcctacttttttccattatacgttctttttctatctctattctatcaaatgagaaaaagctcttactcttcagaactgttttcccacacaaaactctcgtttacatgccgtaattttgcatagaatgtatcacataaagtattaacgtatataaaagagaacaaacaatgaaaaatggtattgtaaacgagttgattactgcaatgaaagaacggatccccaaaggacaaaatcttgccaattctctggcagacattttgtatatgggtaaagaagccgtctatcgcagactacggggtgaagtagcttttactatcgacgaagtagcccttctgtctaaaaaactggggatttctattgatcagattataggtaaccacctttccaatagagttacttttgatatgaacctgctgcattcgcccaacactttagaaagttattatgagattatcagccgttatcagcagatattcgattatgtgaaaggagacgatacgacggaagtatatacagcttccaatcttcttcccttcactctttattcatcttacgaatacatgtctaagttccgcctttgccgatggatttatcagaacgggcaaatgaaaacaccgaactcactggcagagatgcaggtagaagacagaatcgtgaaagcgcataataagctgagtgaaagtgtaaagcaatgtcggaagacctattttatctgggatagcaacatctttctttcctttgtcaaagagatcaagtatttcgcaagtctgaatctgattacggaagacgacgtggcacacctgaaagatgaactctaccaattgctttcagtcatggagacactatctgttaagggagaattcagtgaggggcgaaaagtctctttctatctctcaaacattgatttcgaagcgacttacacctacatagagaaacaagactaccaagtcagtttgctccgggtgtattccatcaattcgatggattcgcaaagtccgcaaatctgtcagatacagcggaactggattcaatcattgaaacgacattccacactaatttcagaaagtggagaagcccagcgtatcgagttcctgcaaaagcaacgtacagtgattgatactctctaaagtacaaacagcccggatcattatcgacccgggctgttctcccttcaggatattactatttatcctgtcccactaataatagttccccactattcttagatcattctattgattctcttcctgaatgcgatgcacccatccattgacaacaatctgtacagcaagccatgattcagacaagaaaaagattatatgatagttgctccgtcgatccagatattcttgtgtgctcagatttttaccctccgcattggtcatagcaagataatcaatcagatttatatcgaacactctctttccggatgctttttcagtaagcaccaaacgagttttccggtcttccatcagtctcattgtattcatgtctacataggcagtcgcaggatccttctgttccatatagtaaggtcggaaactcaacacatcatcatccagtaatgaattatcatgtcccagatgtccattagattctataatctcatagtcatagtcattcatatccagtgtccagctgcctgtataagactggaagccaaatcgtacgatttttgtatctctgatcagatttatcgtctcagtctggtggacggtcccatcgaagttgacattgatgacttcaccataccagagcgtttccatccttttattgatgatgagagaggcttcacgttttagtttcaattttaaatccgtaagagtagagacaccaggtgtcaatgaagtgatatcatatgaatcacgtgcaccggcccatgccataaactgatattgtccgacaggaagttcaacttccatcagataattgccggtagacaatgcacttccctcttcagcttgtttaaacagatatttcccattcttatcaaatacataaagttctactttatctacctgagcatgaaacgcatccgcaaactccatgttatagtcatacttgaacttcactgacaagcggcattccggcaggtcttcattaaagctgtcgcatgaagctactatcccggaactcatcaacagaatacctaaggcaacgtaacatataaggctttttagattcatattttcctttttttcaattatatatagaggaaaagaaataatctcttttctcgttatttcctaattcagaggatagaatactttattgattccatcaaaagtaatatcccgaaattttaaaaagttttcggcaactttgaaaatattgggagtaaagttgtgggagagtttctcccacaacttttatttgaaaaatctatttctattactaattccgaattacataatttcctcttgagtataccaagtccaaggattaggtataatttcaatagacaaccagccttcgtcactctcatccggcgttccttcgtccggatccggaatagccggatatcctggattgttaaacttcttaacattgatatcgtaaacagagttacgaacaactccaaattcacctaattcatttgttacagcactggtatcatcatgtttgatcataattttgtagtaacttacagcacctacataataagtaagacctgttacagttatagctctgtctttagctgcaacatttcctacattagcttttgttgctttaaaatcgtcaacaagactggtaatagctgcagcatcagctgtagcaggaaggctaatttcacctacaccaacagcagctaaatatctattatacgcagtagtacgagcagtcgggaaggtagtaggctctttatcagcatatttagctttcaattctgcctcaatccactccattaatgtagcaaaagtatagaagccaccattgattaacatccagtcaccgacaagctttggatctgcttcctgagctgtagatggattattattatttggcgcaggtctgccatattcagacggaatgaatttagccttcaatagtacatgtgtagtataagcatgtacattatgagttgcagtctgcgtattttcaagacaatattcagcaactttattcaccgtagttgtaggatcattccaagttgaaggagctgaagtactggtataagcattatagtcagccaaagcttgagtactatagttagggtcaactctgtatgaaccgatcttatactggtcaaacggagtaatacatgtaccacgagcacctaaaggtttattagcaggagtctcattccaagtcaacgttctcttagatacagggaagaatgtcttgttagtagcattcaacacccatcccgcatccgaaatagttgcctttgcatcagaatcagcagtaacatatacacgaacttttgatacaacacggtcaattctgatagatattggattattagtagctgctgtctcagttgcataaagagccaaatcgacaggagcaccaaatgttcctgaagcttcatcttcatctgaaggttctaacgaacctttggcgttagacatcataaatttaccagcagttgtcatagaagccgaagtatcgtcaagagctgcatttactgttgcataagtcgttccaacaggccatttttgatctgtctcactagcagtctttgcttcaaatttaggagatggattcgcaataatcaatattcgtttagaagttgcagggactttaaaagccttacctgcagccccactaggaataccattggcatcaagaccagcttcgtcattatccaatgtcaagtcagcagttacagttgcagcatcctcattcgcatttgccgtaaagaatatggcacgcactgtagtgatttttgattcgtcctctgttgcagcttcctgattcgggttatgcaatccacgagtttgtaccggagtctttacagctaatgccacccatgcgtctcctgtcgggtctgtcaccaattgattatcatcacctggattcccagtcggcactaaatcttcgttactacaagcagcaaaagccacagcagcaagcgctaacataaaaaaattctttttcttcattgtttttacaaattaataaaagcgtttgtaactagtttatttatccctattttctattttttctatttcagctgcattcttttttttcttagccagttcctccaaattctgtccggcagcttgcagacccgatttggctgcggctttcaaatattcttccgcatgttcatactctccttttaataacattaatacacccatagcattgctatactcaggcagctgcttattgacatttaccatattcagatagcgttccgcagataccaagtcattacgcgaaagagcagcagcggcagcattaatactggcgatctcatccttcggatacatccggaccgcagtctcgaacacatcgatgaattcctgagaacccttcggatagctgttggcaaccataaacatttcattcaggctcagattctgaggacgtgtctttatgatctctttcgcttcgtccagattaaagttcttaatctcataattcaccttacaaatagccacacgaagacttgggaatatatatttcaacatatatcgataaggtactccgccacgaagctgcatcaacttagcttccctacctttttcaacagggatatcattgataatattcagcgcttcatctttatattcaaaatcaatcgtatccagcgccttcaccagtccatcccagttttcaccaccaaagatgatataatactgatttctcgagaaatcgtatctggatgccaaataatcacgtagcgccatcgcacgtccttcggacagacgtttgttatttgccaatgatccttcaggtgaagcatagcctacaatatccaatttgtttaccttgatactaggatcagacttcaattcatcaatcatcgcacggatcttagccagctccttcgggttattcatatattccggacgaatattaatcttgttcacctcgaagtcgaggaaacattccgcctgtatatcacggctcttcacttcttccgctttaggctgcaaataggcaaagaaaggtgttaccacgtaaggtactaatatacgttccagttcaatatccccaagtggttccacatccatcagctgaatttcgccgcagccgcattcgtcgcgctgtacgtccacccgggcatcgtccatccacgattcgtaaggcaatatatatctgtatcgaatcgtatcatttcttttcttgctacccttttccaccacataaggtttttcgtagctatccttctccttcgcactcatcaatgaaagccaacgttcatacgccagatattcattatgtcccttgatggatactttcggaagattgtaagtatgtgcaggagcaaccagttgcggaataaaatccactccgtgtgccgatttgacctttacatcctccagaacgaagtcaatatttatataaaccgatttaccgcgctgttccaactgtaccggtactacagagataaccccgtcataagagcgtgtctgggcaactgccggatttatattctgacataagatagccaatacacacacgatgaattgtatacttctgttcatcattctattctactttatttaattacgtaaataagtgacacactcgctttggtgggaccgaaatagtttttactgctgtctttcagtttggtaccacacgccctgcacggatatttgtcatatacaatatgtgcataccccactcctaccgatgcttcgatgctccagcgtttcttcagaatccatgaatgaccgacggaaacacccccgccatacagatatccctgatagcggctgttctgcatattctcactaataaacgaccagtccgggaacccaccgacattgaagtccgcataatgtccatgcactccgatgaacgtacgtctgaacttctcacaaaaccagtagcggacttccggctgtattccccaatggcgcagacgtcttccgttgtccggcttccagggattatagttcaccggaacgtccagcgtccacttacgtgccagtccgaattccagcccgagattcatggtagtcgtagcgtcatatagaaggttgcttttaagcgcaactttctgagctttactctcgataaaacatccgagcaccaatactatgagtatactaactttcttcatttatcttacgtttattaattacccttttgagtgatatcaattttgatacgcttcaccgtactttcacctgtatataaactaccgggcataattgttgtcagatacacgataccgtttctcgttgttgaagccgtattaggcattattttaatatagatatgcccgtcttccactatgattttatccgtatcatttctgtccaccatcgaagatggcagtaattttatccattccttaggattgtcagtaccatcttccacctccccggtaaggcaatgataatccacctcaccagtcgtcggaaacggataactattggcaggcatgtatttaagtatggtaccgccggcatcaatagccgctcttcgtctgatatgaacctgtttttccaaatttccaagttttaatgttatatatgcattcactttatctcttccctcaaaactctgccccacttcactatacatcagccagctttgtatcaatacactgaccggagtgacacgtggagaagtgcttgctactataggcaattttccgtcagcgggactgcttagcgcaaacgaattatcagcttcggccatattgtcggttattgtacgcgcatccggaaaagccttttcacaatccgttatcactttaaaagcctcataagtactcgcatcatccggagaataagctataaagacagaattactcacacccagataataatcattgttagctataatctcataagaattactgtcgtccactgtaatttcaaaatccagatccgtattcgacggtttagaaagctttgcatccgctacggtatcatacccccgtccatgcactttctttattgtaaaagtatacgcatgattccgatatatattcatatagttcagatccttatctactatcgccattttgtaataatagcttttggtttcataaattccctgaatgatcagatatgtactataagtctgggtattggtttcatagatataaataggactgttttcggtactttgtttattggttatcgtttctgctgacaccaaaggcaacgagcatgaagcatcgtattgataattcgtcaaattaccagcattgcccataatagaagcagggataaggttatgcaactgcccctgtcgcggaacgtttgccacagcagacactccttccagttcaaagttcgatgcttcattaacaaccacgattttggcaaccgcccgaagaagcatcaacgaactcccgtcactcttttctatcttcgttgtattatccaccttatctacttccagcaaataactcatcggtatcgtctcacccacaccgctgaacgggatgcgggcaggagaagtacttgccggctccgtcagcaagttcgtacatgcagtagccagggtagttgttccctcaatcaacttctcagtaagttgtgactcattgaaaacatatcccgtagaagcatttccgtaataaaactgagccatcggattagctaatatcagcaactggtacttacttccatcagtccgcttagttaaaaggacatatcgctttcctgcaaactcgaaggcctgcacagcttctacaaaaatagcccctgtgccactccctctgaacacgagtacccagggagtcatttcgaccgtattttcatcccctagtgccctggtcgaaggcaggcggtatgaattcgcccgtgcaaaaatctcaagccgcaccttgtcttccgaaatatctcccggatcatccggctctcccgtcaacaatgtttcatgctcacaggcggatatcagtaagatgatcaccagaccaaatatcttcattatatatttcatcattttcttcatcttttcacgcaacgtattgataattaacctcctgtatcatcggaattaattgttcggacaaggaatagcgttctgaatacacaatatcattcagattatcataagcagtaatataattcaattggtttattacgggaatattatacggttcattggcaaaaaatacaaaatcatacgtttccggattgactagatgtgtactgctctgaacacctattcctctgatcgaaataaatgtccctttggcagtagtattattagtgaaagtatcatccatacaagataatatagctactaataataaaaggttgaacaacccaatattcactttaaatccctctaatctcattaaacattcgtatttacctgacattggtactcagtcaagccttaatctgtaatcagtcaaaatctcataatgcaaatgtcgggatattgcatgactctgcgaatttcattcatttctcatacagacaatgaaagttatcttatatggctaataaagaggtcgtccgaatggaatattgcgaaatctaaaaataaggagtagtaaaacaggcattttgcactattagaataaaaaaaagacaaaagtttcagcattcgaaacttttagtgtgaattaatataaataaattccataataaaacaagcccccggataatctcatccgagggctatgttatatactatgatacaggtgaaaaatcagagtgttttacgttctgtctccgtaggtgccacctcatccgggatactgaactcccggttggcaaacaaatccgccagtcccgaaatctgcttcaaacgcagcagttcatcccgatccattccgatatttttcataatccactggtcggacatgccggctctgtccaattctgctacaatgttacacatcagctcaatattatgcatcccacgggcacggttgtgccggatggtagagctcatacgattggacaaatccttatcgatcaccacaatcggaagcaatccgttctcacgcttataaatccgtttcgatgtcttcaataccgtatatcggtgataaccatctacgaggatataattatcttcctctttattgtaataacatacacaaggcattgtaaaaccgtcttcccagatcgaaagctccagtaacttcatttcgggaggagctacgacattcgggttataatcgttcgctaatactttttctacgggcactgctttcacctcgtagaccggacttttatctacactcatgatactatgattctatattgttccataacttgacttctcttactcatctcctctttggtcggcgagaatcccatgtatttgcaggcatggtcattcttgaggatacagatacacatacgcttgtaagtcggtatttccctaaattccggaatatcgatatcatcctgatattccatgcgcaccggcttcttgtatgtcttatagttgctattgtccatcacgataatcggcactttggcatcaatcagtttctgaatggtggaatcactcagacagcctcctttggttcgccaaaaatgtacactgacagacagtttacgcagatacccctttcgggcccgttccggcaaggtagagagcaggaagtacataaactccctccaggtgtacccttccggaagtttcaccatctgccatcccatagcgtgcgtgcctccatacataccggtgaagttcacgccattcacccgtcctatcatcttcccccaggtgttagggtcaagcacccggtagagcgccagactctcctgcgcttcattgatgaacgggcttgctacccgttgacgttccagattgactccggcacgataatacaggtcatacagtacattatagtcccactggaattttccgtttgccgtccacacatccgtcgtcttccagtcgaagatgggataggcattatagatgtcatttccgacctttgaagtccatctatacttatgatacatctggaatttgcggctcatatagatacatcgccagcggttaaaactttcctgcgtacggataccgatcagacagcaggtgcgtaccgcatcctttttctgatggagccactgcgcaaaacgcatctgaaattcataatcccacatggtcgtattgtaaaaaggaaaatcctccttcttcatggccttcttaggcatggagcgtacccagatatctttcttgttatcctcccagggccgccagaaggactggtacatagatgtacacgtagatacccggaaaggcacgcacacacggtatacatccaggatgtccttgttcgcctccagtatcctgtccacatagtcgatggtcatcttgtattgaatctcatagtccatgtgaaacactcccaaacgtattttcagattattccgcctgatgtagtcgatacacatattcagcagaaccccactatcctttcctcccgagaaagatacataaatattatcaaactcgttaaatattactttcagtcgctcttgtgctaattcatatacattttttgttcctgtgattgttttttttcccataattcatctgttcatttttacatagcgtgtccacttcttgtccatagatgcaaactcgaatttctcaaaagtttcctgatcttgtatcagcgtgacagagttaagcgtccaacccgcaggtataaatgccgtgactacagaagatagcagaagcgacaagatctcttttcgtttctcgtccaccgcagctacataataattattaatgacagcctttttcccgcttttctgttcaaccggaataaagcctatcacatctctgttatcaatcgcaatgtaccaaacaaaatcttcgcttgtcttgaacggatagttattatttgcacgtattacatccggatccattactagaggcgccaaaagctgatataaatgtttgtcttttccttttaattgtattacctgtatcatagcattcaaaaatagacagacaaaaataggtaaaatttcctcgtttcagcacaaagcatgcgtaaaaaatttattttttagcaattccccctcttgtttcataattatttccaattctcccaccatctgatgagtgcattaatccaatcgtatttttatgttccgacagccgattactttatacaaagcaatatggtttcttccttgtccctgcaatattttctcaatccttctttccctttccagtaaagtctcttcattattttccacatgaaactttttattatacctatttccattatacttataaaaaacaatccctttttgcttccggaaacggaaacaaagactatttttttcaattgggtatagccgtaacagatcggtaattctcttcacgattctatcaagaaaatttcgttacatcacttgtaccgacctcaatacagatctcaacgatatagcagtacgtatgtatccaactaacgaaacggcaaacctgaatagcatcaattatctgctgaatggtatccagaaacagacttttcacgactcagcacaccatatctacagttgggaaattgccgtttacgattcagtaaaaaaaaccggaagaaaataaaatcggcgcactatctttgaaccaaagaaaagaaaaagtataactcaaaaagtacaattatgaaaaagttatcaatcttatcaatgttgctattattcattagcatgggaaacattcaggcacaaactgtcaaagaagaatcccgcaaacaaaaaaaagctgaacaagaattactcgaccaaatgtttttcgatgaagctaaacaagctatagaaatgaaaaacttcattttggaagcagatcatgttatgtttaaatatggtaccacagctttcgtttctcccaacacaaattttgtagcggtaaaaggtaataaagctgtggttcaggtagccttcaatattccgatcagcggtcccaacggtctaggcggcattactgtcaacgggaatatatccagatataagcagactaccgacaaaaaaggtaatatatccgtttcgatgaacgtaatgggagtcggaatatcagcacaggtgaacatccgcttgaataaaggaagtaataacgcatcggtagacataagtccgaacttcaattcaaacaacttttcattaacaggaagtttactcccaatggctaaggccaatgtattcaaaggcaattcactctaaggtagaaaatgtgtgtttagtaaataaacaagttaaaatattttagctgactataggcattaaattaaaaacaactatggtttaacacttaaaagaaagaatatgaaaaagtatctgtttataggattaatggcagtacttgccacttcgtgtgaaaaagatccggatttaagtaagcttgacaataatttcacagtttacaccaattatgacagcaaaactaatttcaatgatttcaaaacttattgtttgcccgatagtattctactgataggacagggaatgaaggcggagttttggaaggatgagaatgcacaagaaattattaagcaggttgctgatgagatggatacccgtggttatacaagggttaaagtgattaagaatgctaacattgggttacagctctctttcacgcgccaaacaacccaaataataggaaccggcggatggtatggaggcggatggtataacggctggtggggccccggttattggggaccatattggaacgactggtattatccgtatcctgtaacttatagttataatacaggaacattgataatggaaatggtaaatttgacagaccatcccgaggatacaagtcagaaagtaaagttaccggtaatctggcattcatacgcaaccggactattatttgagaattccaaatataacatgcaactaacgttggatgcggtcaatcaagcgtttgaccaatctccttatatcaagaaatcctaaaaagcaaaattatgaaaacaataaaatttattccgaagaaaaagtatattctggcattcatgatattgggcctgttttatttcagtagttatgcacaggatatcagcgatagattgcattttaatgtagactggcagatgaatgctcctctcaatacgaattttgccgataaaatcagtggttggggtatgaacctggaaggaggttatttccttactccacactggagtctggaggctttccttgatttccatacaaatcataaatatgttccgcgtcaaaccataactgaaggtactgcttcgttgactactgaccgacaagagtcggctttccagctaccattcgggcttgccgcttcataccgatttatcagcaatggatgcctgaaaccttatgttggcaccaagataggaaccatgtatgcccaaaatacaacatatctgaatactataagtctgacagataaaccctgggggttctatgtctctccagaaattggagtgaacatttatccgttttcccaaagccgatttggtttccatctggctgcatattatagttatgccaccaacaaaagcgagttgctgaccggttgtcaggatggaaataataatattggattccgcttaggtgtttgtttctgacatgatctagattctctcaaaaagacaagaggaagtacaaaatgttatagttacttttggcgacctcttgtttttttgttaaatttgtaatatataaagtctacgttcaatatgcggcaaaagttcaattatctgtttattggtttgctattctcaggattggcatttttctcatatctgtttctcttgctttattccgacttcaccccgcaacatctggaagtactgatttctttcaagtcatttatcctgatacttgccgcctttaatctagtcggtttcggagtattaatgatccacaactggcaaaagcgaagctttcagtttctggtcaaacgaaaagagcgattgattatcgattgcattctgacggcaattattctgtttttaatgaattatctggtcttgtcaatagtcaaagccatatttgaggttcctgcaccatttactctgaaagggtccgggctgagaatgatagccttagtctggctggtagaaatggtaataaccaaccttactttgactatcaatttttacaggcagctagttcttctgcacgaaagaacggaacaagtcgaagagaattccattaaggcacagtatgcagctttgcaaaatcagctgaatcctcattttctcttcaacagtctcaatacacttatatccgaaatagagtatgctcccaaaaacgcaattctatttacccaacgtttgtctgatgtataccgatatatattacaaagccagcaacagcgtctggttactatagaatccgaactctctttcatcgactcttatatttttcttcataaagtccgtttaggagactgcatccggatagagaatagaatagaagctgataattatgatttgaaactcccctcattaaccctgcagctattggtagaaaatgtcattaagcataatataattaatatggatatgccaatgaatattttgatcgattatgattctgagaatggaagaatattggtaaccaacaaaatcaggataaagcccaatgtggtcagcaccggcatgggattaaagaatctttcagcccgttacctcctgatatgcaatcaggatattaccatagaaaacaatacgaattattttaccgttaaaatcccagtactgaatgaataaaattacagcagtcattattgaagacgaaattccggccgcccgtcggttaaacaatacattaaatgagttacgccccgaatggcaaattacagtattacccggtagtgtaaagaagagtgtagaatggtttgcggaaaatccccatccggatcttgtttttctcgacatacaattgacagacggcatttcattcacattcatcgaacaggcacaaccagaaagtactatcattttcaccactgcgtatgatgaatatgccattcgggcatttacagtcaacagtatcgattatttacttaagccgattgataacatccgactggaagaagcaattgtaaagttcgaacatctgactaccaaatacctgaatcaggggcaaaagccaattgacttaatggaaattttacaaaacatcacccaaccgggaaagaaataccgtacccgtttcctaatctcaggcgatgacaaactttttaccttacaagtggaagacattgcttatttttattcagaaaataaagtaacctttgccgtaaccaagcaaaatagagaatttatcattgacctttctttggacaagcttatggaacaactcgatccggatgtttttttccgaagcaatcggcaaacagtagttagcatcaatgccatcgtaaaggttgagtcatattttctgggaaaagcaatcttacatgtaaagccgccttttaaagataagataattgtcagccgtgacaaaatagctcctttaaaactttggctaaattattaaatttcagcagagttaattctgcatgtctcaatattcatattcccaatcaattgctttttcactcagtaagattaataagaaaagctccgatcccgttaagaaccagagcttttcctaattataaaaatcaaaagaagcggtgcgtacgggactcgaacccgtgaccccatgcgtgacaggcatgtattctaaccaactgaactaacgcaccaaaatttcctttttaattcgcatctctcccgattgcggatgcaaaggtagacatttttttgaaacctacaatagcaagagtatcttttttctgaaaaagtgtgtttattaagaattatcacgtacatttgcaagcattactataaatagaaaatagaatgaaaaatacaccaatcgaacgaaatgtgattgacgaaacgattaatgagtttcaaattgtcgacttttcgaaggctactatccgtgaagtgaaagcgatagcttcaaaggcggaagcagtatcaggcgttgaatttatcaagatggaaatgggtgttccgggacttccggcctctgccgtaggagtaaaagcggaaatcgaagcgctgcaaaacggaattgccagcctgtatcccgatatcaacggattgccggaactcaaaaaagaagcgtccgactttatcaaagcattcatcaatgtagatttaagcccggagggatgcgtacccgttaccggctctatgcagggaacattcgcttcgttccttacttgcagccagtgcgatgaaaagaaagacacgatcctgtttatcgatccgggatttcccgtacagaaacagcagttggtagtgatgggacaaaagtatgagacatttgatgtctacgactaccgcggtgacaagctgaaagaaaagctggaaagctatctgagaaaaggaaatatatcggctattatctactcaaaccccaataacccgagctggatttgcctgaaagacgaagagttgcgcatcatcggcgaacttgccacccaatatgacgtaatcgtactggaagacctggcatactttgcaatggatttccgtcaggatctgagcactccttatcaagctccgttccagccttcggtagctcactacacagataattatgtgttgctgatttccggttccaaagccttcagctatgccggacaacgtatcggcgtgagctgcatttccgataagttgtatcaccgcagctatcccggactgacgaagcgttatggcgggggaacattcggcacggtcttcatccaccgcgtactctatgcactgtcttccggcacaagccactccgcacagtatgcgatggctgccatgctgaaagctgccaatgaaggtcaatacaacttcctcagcgaagtgaaggtatatggtgacagagcgcagaagttaaaagagattttcctccgtcacggattctatctggtatatgacaatgacttgggcgatccgattgccgacggattttacttcaccatcggctatccgggaatgacaagcggcgaacttgccaaagaactgatgtactatggagtgagcgccatttcactggtcaccaccggaagccaccaggaaggattacgcgcgtgtacctcttttattaaagaccaccagtacgcacagctcgacgaaagaatgaaactgtttgccgaacatcacccgattgcctgacagccgaataccggatttatgccggaactgatgttcatgtcagatgcggatattcataaaagctgctcttaaaacaaaaaaaatgggaaagtatggctattattctatttcttttcttatattagtggcacgaatatcaatctgatggcatgaatatagactctgacatatttaaaattcaatcgaataatgtattgccatcacgaggaaagattctcatctccgaacctttccttcgtgatgccacattcggcagatctgtagttctgttgatcgaccataccgaagaaggcagcatggggctgattatcaacaaacaactgccgatatttgtcaacgacattatcaaagaattcaagtatatcgaaaatatacctttatacaaaggcggacctatcgctacagataccctgttctaccttcatacactggcagacattccgggtgccatacctatcagcaaaggactgtatctgaacggtgactttgatgagataaagaaatacatactgcaaggaaacaaagtagaccgctacatccgcttcttcctgggatactccggctgggaaagtgaacaactgagcaccgaactcaaagagaacacatggctcgtctccaaagaagagaatgcctatctgatgaacggagacaccaaggatatgtggaaacaagccttggagaaactaggcagcaagtatgaaacctggtcacgctttccgcaagtgccgactttcaattaatgtctcttcggattcagatactggaagatagcagcatctttgtaacatccaccgacctgtaaccaatccttcaacagtccgcattggacgaaaccgcaggaagtaaacagtttcatacagacttcattgtccgtagccacatgggcataaagttgagtcagcgacaagaaatcgaaagcatactcgcacagcaactgcaaagcgtccgatgcgtaaccttgccggcgatagtctttatgaacagctatgccgacctcaccacgagagtggagaggaacaaaatccgtgatatcaatcgtccccaatatccgatgatcggacttactcattatcatcaggcgcaactgcttgtcggcaaacacatcacactgggaaccctctatatattgccggagcacgtagcgggaataaggaacggtaaaattactgatatcccacatggaagggtcattctccatctcatacatcacatccatatcttccggctctaccgcacgaagatagatgcggtcattacttaaaaaagactgtttcataccggcttattctttattaatatggagttcgttacgaagtcttttctcgctgggcagacaaaaaagggaagcggtcagcccgatcagcatacagagatttccggtgttgctaagagtcagataatagcataatacgttgaggacgatagccacttcgagcaatccgaggcgtaccatgctccactgcacataacgcttcaacgcaagaggaatcgtcaggaggtctatcttctttttcagtaccagactgaacagtttcaaggcaagcggcacacacaaggcggtcagcaagatacctgccgtctccatataataggtggcctgtgggttatcgaccaaagctcccacaggaagaaggtcgaactcccctgccccaagcaaaaaggcgggaagcacccaaaagaaaacataactgatattcaaatttctcactgcgcgttttatctgttcttccatgttagttacgatattcgttcaaataataaagttagattatacggttccggtaaaaagagtccggttgacaatactgcgtcccagagtgatctcatcagcatactccagttcgtcaccaacggagatgccccgtgctattacgctgagtttgacacccatcttctccagtttacggtagatgtagaagttggtggtatctccttccatcgtggtgctcaaagcgaggacgacttccttgattcctccttcggatacccgctgtacgagactttctatttgcaggtcgctcggccctaccccgtccattggcgagatcactccgccaagtacgtggtaaagtccccgatactgctgggtggcttctaccgccatcacgtcacggatattctctaccacacagacagtagaggcgtcacgctgcggattggcacaaatctgacaagtctcggtatcagatatattatgacatactttacagtactttacttcacgcttcagcgtaatgatggagttgccgaatgcctccacagtagccgtgtcctgccggagcagatgtaatacaagccgcattgccgtcttgcgcccgatgcccggaagtttggaaaattcgcctactgccttttcaagcagtacggaaggatattgttggttcatagattacgaatgaaattctatctgtttcgggcgcaaagatacggattattgtttttaatacaaagaaagtattacctttgcagccgatatgatgatattagtcattattatatgctattttgcgggcttgttgttaatagcccacatcaccggacataaaggcggatcaaatgcagcgttctttaaaggagaaaacaaatcaccctggtatatagtctccttcggcatgattggcgctacaatttccggcgtgactttcgtatccgtaccgggcatggttcgcggaatggacatgacgtatatgcagaccgtattcggattcttcttcggctatatgatcgtagcacacatattgctgcctctttactacagactgaatctgacgagtatctacggatatctcggcacacgcatcggtgtgcatacctaccgcaccggctctttcttcttcctgctctcccgtatgctgggaacggcagccaaactgtatcttgtctgtctgatcctgcatacgcacgtatttcaggatatgcacatccctttctgggtgattgccgtcggctccgtggccctcgtgtggatatacacccacaaaagcggcatcaagacaatcgtatggacggacaccctgcaaacattctgtctgatcgcagccctgctattcatcatctacttcaccatacagaagctggatataggctttgacggcatcgtacagaccatccgccacagcgaacacagccgcatcttcgtattcgacgactggatgtcccgccagaacttcttcaaacagttcttcagcggcatctttatcgtcatcgtcatgaccggactcgatcaggacatgatgcagaagaacctctcctgccgcaatctgcacgaagcccaaaagaatatgtactgctacggattctcattcatcccgctgaatttcctgttcctgtgcctgggcattctgctgatcgcattagcgggacaaatgcaactggaactaccggccatgaatgacgatatccttcccatgtttgccacacaaggatatctgggacagtcggtactggttcttttcaccatcggcatcatcgccgcagctttcagcaactcagactccgcgctgaccgccatgaccaccagcgtatgtatagacctgctgaagacggacaaagacacggaagaaacagcccgtcgcaaaagaaagaaagtacacctgtccctctccatcctgctggctttctttatctgcctggtggagatgctgaacaacaaaagcgtgattgacgcgatctacatcatcgcctcctacacatacgggcctttgctgggcatgttcgccttcggactgttcacccggcgccagacaaaagaccggctggtcccgctcatcgccatcgcctctccggtgctctgctacgctctggactggtggataaacaaagaaaccggatataaatttggctatgaattgctaatgttgaacggaagccttacctttgcggggctcatgctgctgtccggaaaagagaaaacggcgaaaacgccttgaaaactggcgtccggagtttataataaaaagtagtggagtttattataaacgtgaccatagtttattataaacgataagagagtttattagaagcagaaaaacaaagaaataaatgacaataaaatggaaataacgagtgcagaatttgtgattagcaacacggacgtgaagaaatgtccgacaggagtatttcccgaatacgccttcatcgggcggtcgaatgtaggaaagtcgagccttatcaatatgctgactgcccgcaaaggactggcgatgacctccgccacaccgggaaagacaatgcttatcaaccacttcctgatcaaccaaagctggtacctggtcgatcttcccggatacggctacgccagacgcggacaaaaaggaaaagaccagatacgtaccatcatcgaagactacatcctcgaacgggaacagatgaccaacctgtttgtattgatagacagccgtctggaaccgcagaaaatagacctggaatttatggaatggctgggcgaaaacggcatccctttctccatcatcttcaccaaagcagacaaactgaaaggcggacgtctgaaaatgaatatcaacaactacctgcgtgaactgagcaaggaatgggaagaacttcccccgtatttcgtatcttcttcggaaaaccgtacaggacgcacggaaatcctcgactacatcgaaaacatcagtaaagaagtctataaaaataagtaaacgaaaatgaaaaagaacattttatttattgcatgggttgcattattctcactctttgcaagcaacagtcaggcacaatcattaaaggatctgctcaacaaagacaacatctccaaagtagtaaatgccatcaccggaacacccgaaacgatagacatgacaggcacatggacttacagcggttcggcagtagaatttgaatcggacaatctgctgatgaaagcaggaggagccgcagccgccacgatggcagaaaacaaattgaacgagcaattgagtaaagtgggcatcaaagaaggacaaatgagcttcacgttcaacgccgacagtactttcaccagcaccgtcggaaaaaagaaactgaacggcacttattcgtacaatgcttccaccaagcaggtagacttaaagtacttgaaactactgaacctgcacgcgaaagtgaactgcacttccaactctatggatttattgttcaactccgacaagctgcttaaattaatgacattcctcggcagcaagacaaacagcacagcactgaaaactgtcagctcactggctgaaaactacgacgggatgatgctgggattcgggttgaagaaatagtgttttatttgcaaaaccaaaagctctgaaacgccttctggcagggctcgaaaaccgaatcctaaccgaaagggaaaccgaaccttaaccagtagagaagagtagagtatataattctattctaaagaaatagaattactaagaaagagaagaaagaattttgccgccgccgattcactttcggtgtagaaatgaatcagaccagttcatctttgattcgatgttctctctgttctctacgttgttgaatgcgtttgtacaacttaacaataaatgctataaagtaattcaactcataaaagggagtcatatgatagaaatcaagttttgttttcataatagctggattttatgggtttgttccaaatatagtaattttttatgcgataaacaaaaaatatgagtattcattagcgtgttgaaatgaattaatttagcgaacagagatcggcagtattcacctcggtgctcacttctgctcgtctcggtgctcagcgtttttcgcctcgctgcttactctcattcagctcggcgctcagtgttccccacctcggtggtcaggattgccaagcccaaggacgatgataaacagaagttattttattccctttttcgataaaattaactctgccgacgggataatttcagggaaaagcgttacctttggcgtttgtaatcaataaaaagaaggaaaaatgaaaaagatactttttttaatgaccttgttagtggtaggagtaagtttcgcttttgcccagactaacgctgatatcaagtttgacaaaacaacacacgactttggaaaattctcagaaaacagtccggtagtaagctgcgtattcactttcactaatatcggtgatgctcctttagtaattcatcaggcggtagcgtcttgcggatgcacagtgcccgaatataccaaagaaccgatccagccgggaaagaaaggtacaatcaaagtaacttacaacggaacaggtaaatatccgggacacttcaaaaagtcgattaccctgcgtaccaacgcaaaaaccgaaatggtacgcctctatatcgaaggcgatatgaccccgaaagacgagaagtaagaaaaaatagacataacgtaaaggagaatctttcgattctcctttttttttgtttactttgaagtccattaagcataaactactaaaaatataatatgaaacaagaagaagacaaattcaccggactacccgagaacgcgttcagagagttaaaagcaggagaagtgtacaatcccctgatgagtccttccaaaaattatccggaagtaaacttctggtcagtaacatggggtatcgccatggccatccttttctcggcagccgccgcctatctggggctgaaagtgggacaagtattcgaagccgctattccgatagccatcattgccgtaggagtctccggtgcagccaaaagaaaaaatgcgttaggagaaaatgtaattatccagtctatcggagcgtgttccggtgtaatcgttgccggagccatctttaccctccccgccctttatatccttcaagtcaaatatcctgagatgacagtcagctttatgcaggtatttatcagctcgctgctgggtggcgtactgggtatcctgtttctgattcctttccgcaaatatttcgtcagcgatatgcacggcaaatatcctttccccgaagcaaccgctaccacacaggtgctggtgtccggagaaaagagcggcagccaggccaaaccgctgttgatggcgggaatgatcggtggattgtatgacttcatcgtggccactttcggctggtggaacgagaacttcaccacccgcgtatgcggagccggagaaatgctggctgagaaagcgaaactggtattcaaagtaaatacgggagctgccgtactcggtctgggctatatcgtcggactgaaatatgcttccatcatctgtgccggatcactggcagtatggtggatcatcattccgggaatgtccgccatctggggagacagcgtgctgaacgcatggaatcccgaaatcacgtctacggtaggcatgatgagtcccgaagaaatcttcaagtattacgccaagagcatcggtatcggcggtattgccatggcgggtgtcatcggtatcatccgttcatggggaatcatcaagagtgccgtcggactggctgccaaagaaatgggcggtaaaggcaatgtagaaaagaatatcgtgcgtacacagcgtgatctttcgatgaaaatcatcgctatcggctctatccttacgctgattctgatcgtgctgttcttctacttcgatatcatgcagggaaatatcgtccatacgctggtagcgattgcgctggtagcaggcatttccttcctgttcacaacggtagctgccaatgcgattgccattgtaggcaccaatccggtatcgggaatgacattgatgacactgattctggcttccgtagtgatggtagctgtcggactgaaaggtccttcgggcatggtggccgcacttgtgatgggtggcgtagtatgtacggcactgtctatggcgggcggtttcatcaccgacttgaagatcggttactggctgggtagtacgcctgccaaacaggaaacatggaaattcttgggaaccatcgtttctgctgctacagtaggcggtgtaatgattatactgaacaagacatacggcttcaccagcggcgcactggctgcaccacaggccaatgcgatggctgccgttatcgaaccgctgatgagcggcgtaggtgccccctggctgctgtatggcatcggtgcaatccttgctatcgtgctgacattcttcaagattcccgcactggcctttgcgctgggtatgtttattccgttggagctgaatgtgccgctggtagtaggcggtgccgtcaactggtatgtaacaagccgcagcaaggatacggcactcaatacggaaagaggtgaaaaaggtacgttgctggcatccggtttcattgccggaggcgcattgatgggagtagtgagcgcggcaatgcgtttcggcggtatcaatctggtcaacgaagcctggctgaacaatacctggtcggaagtgttagcattaggagcttacgctttattgatcctctactttatcaaggcttccatgaaagtaaaataagatgaggaaactgttatctgttatagtatcacttatgactgcaatgacatttgcacaacagcccgtcgagctacctttgtggcccgacggtgctcccaactccaacggactgaccggcggggaaaaggaagtgtcaccccacagaatcagcaatgtcaccgaccccaccataaccgtttaccgtgcaccgcagccgaacggaatggctgtcatcatgtgtcccggaggtggctacagccgcctcgccatggatcatgaagggcacgatatggcatcctggttctgcggacagggcatcacttacgttgtattaaagtaccggatgccgaacggtcattgcgaagtccctttgtcggatgcggaaagagcgattcgcatcgtacgcgagcatgctggagaatggaatatccatccccgcaaaataggaatcatgggagcatccgccggaggacatctcgcctctacccttgccacccattacagtgcggcatcgcgtcccgactttcagattctgctttatccggtggtcaccatgacgcaaagtactcatggcggttcgagaaaagagcttctgggcggaaatccgaccgcagaacaagaggtactcttctccaacgaactgcaagtgacatccgatactccgcaagcctttatcgtcctgtcttctgatgacggtgccgtgcctccttccaacggagtgaactattatctcgctttacagaaaaacaatgttcccgcatcgcttcatgtctaccctaccggcggacatggctggggattccgggacaacttcaagtataagcaacaatggacacaggaactcgaaaagtggttgcgtgagggtgtcgtatttccgaaggagacagcaccgatgttgagaatcggaaagacgtaccttggaacaaagtatgtagccaacacactggatcagggaacggaagaaaagttagtcatcctgccccaaacggtagattgccttactttcgtcgaatatacgctggctcaggcgatggggtcttcttttgccgataatctgcaaaagatacgttatcgggacggtgtgatcgacggatacacttcgcggttgcactatacctccgactggattgagaacggtgtccgccaaggatttctggaagacgttactgcacaaaacagtacgcagaccaccaaactgtctctctcttatatgtccacccatccccaaaagtacaggcaactggcggattcgccggagaacgtgaaacggatggccgagcatgaaaaggcattgtccgggaaaaaggtacactggctacctaaaggaaaactccccgacgcaggacttccgtggatcatggacggtgatatcatcgccatcaccacgaatcttccgggactggatgtagctcatgtagggatagccgaatatataaacggaaaattgcatttgcttcacgcctcttctacgcttggcaaggttgttgtcagcgaagagcctctcagccaaatgcttcgcaataataaatcatggagcggcatacgtgtcgtccggatgtctcacccttaaaacaaatgattatgaaacgagtaaaacatttacttctcgcgtcgtgtctgttgcctacttttctgggagcacagggagtggcaagcgcctcttttctggagattactccggatgcccaatcggcaggtatggcctgcacaggactggctatcactgacaatggaagcacggctatctttcataacgcttccaccatcgctttctcgcaggatgtaatgggtgccagctactcatacgctgacataaataaagactttggaatacatagcgcatcccttttctaccgcatcggacgggaagggaagcacggatttagcgtaggattccgtcactacaaagatgccgattttcattggcaggacggtgcggaagatcatgcccgcgcatggaacgtagaagccgcatactttagaaatgtagccaaaaacctgtccctttcattaacactcagatatctgcaggcaaaagcctataaggatgcggacagcaaagggtcagtctccgtggacctcggtgccagctatcatcgcagcatgggtattctggacgaaatggcttcatggacaatcggatttcaagccgccaacctgggtagcaagctggacggacagaaactgcctgcccgactgggactgggtggtgccatcgacctgccgttcagtatggacaaccgcttgcaggtggctcttgacttcaattacctgctcccgtccgagtaccgccatcttcaagccggcatcggagcggaatataatttcctgaaatatggaattatccgtggaggatatcacttcggggataacgacaaaggaacaggcaactacggtacactgggctgcggaatcaacttctggccgattcgcgcagatttctcttatgcactggctgataaagactgtttcatgcataagacatggcagctcggcattggaatcgttttctaggcttttccttcgggcagtccgctaagttttatcattgagcagagtctgctgggttctttcattgagcaatctgctgatttttttcgttcagcagcctgttaagctcgccttcgaggcgttgcttcacttcgtccataggcacttcgtgcttcagctcctgacgaagagaagtgacgcctttatctataaagccacaaggatgaatatagctgaaatagcgtaaatccgtattcacattcagagccagtccgtgcatggtgacgtaatgactgctcctcactccgatcgcacaaatcttacgggcacggggcgtactcccctccagccagacacctgttgctttttcaagccgtcccgcttcaatgccataggaggcacagacacgtatcacagcctcttcgagcaggtgcacatattcctttagccccagatgaaactcttccagattcaagatcggataacagactagctgtccgggaccgtgatacgtgatatcccctccccgatctatatggaaaagggtagcctgaatggctttcagctgatcgtcattcaacagcatattattttcttttccgctacgtcccaaagtatagacgtgcggatgttcgcacataataatacggttttcatacgcttctccctgcgcttttgcgcggacaagggtatcaaaccattccgtctgccgctgccatgcctcggcgtacggaatcaaattccagtctactaatacagttttcatgaagacaaaagtaagaaataaaaagaaaaatcgtacatttgcggaccgaatataacaagcactctaaaccaaagataacaaacactcttatgaaaatggaagttccacaagtagatttgcctctggaggtgttggcatggactaaagtaaccgaagatattctgaacatctacaaacaatcgtgccggctgcaggcgtgtattttcgccatctgtacggaaggaaccatgaaagtctccatcaatctgttggaatacgaggttcacccgaatgatctgattacattacttcccggaacaatcatacagttccgtgagaaagcggaaaaggttagtctttgttttgccggattctctgcgaaatgtatcggacatatcaacttgctgaccaccatcgggaacgcttatcccaagctgatagaacagccgatcatccctctttccgagaatatcgccgactatctgaaggaatattttgccttgttgtctcatgccagttgtgacgagtctttcaagatggactccaaattggcggacttatcactccagactattctgacaagcatccagctgatgtaccggaattattcgggaaacaatcattcgaaccgtaagaaggagatttgccggaagttgattcaactgatcactgaacactacaaagaccagcgttgtgcacagttctatgccgatcaactgggaatctctctgcaacatctgagcaccaccgtaaaacaagtaacggggaaaagtgtattggatactattgcttatattgtcattatcgatgccaaagcgcagctaaagggtacggatatgactattcaggagatagcttattcgctgaatttcccgaatccctctttcttctgcaagttcttcagacggcatgtagggatgtcaccgctggaatttagaaatagttgaggtctgtaaatcaaaggctatatcatggatggaggctacatataaccaatcttcattatgatattatttaggcacgaattacgcgaattacacagttctaaaggtttaaaatccgtgttaatccgcgtaatccatgcctaatttaaagttataaaggagctttaccacgctccctgtcgatgtttaaatcttccttcttcccaaactcaacgaattgagcactacactcacactggagaatgccatggcggcacttgccagcatcggattcagcaacaatccgtttatagggaacaatactccggcagcgataggaataccgatcaagttgtagataaatgcccagaaaaggttctgatgaatcagtcgtacagtctgcctggacagttcgaaggctttggggagtaacagcaagtcggacgtcatcagcgtcaccatagcgacatccatagcaatatccgtaccctttcccatagcaatgctgacgtcagccaacgccagtgcctgtgagtcattgataccatcgcccaccattgccactttctttccctgcatttgcagctcacgcacaaattcggctttatcgtccggcaaggcatctgccacaaatcgctcgatacccagacgggaagagactgccagagccgtccgctgaccgtcaccggtaagcatacagatatcaatgccctgacgtttcagttcttttactgcctcggcagaagtagccttgatcgggtcggaaacggcaatgatagccaaaagttcattctcacgtccgaagtatatgattccgtttccgtctgattcgtagtgtaccagcatatcagccatgacatcgcttactgtagcgctgaaatctttcagaagtttatggctgcccacccagtaagtcttaccttgataagacacctttatacctttgcctgtgatgctttcaaaactgctcaaaggagcgggagttatcttttcctcgtcttggagtacggctacaatcgcgcctgccaacgggtgttccgatttcagctcggcagcaagaagtacatctttgaagtgttcttcctgcggctgtgcccacaaccatccggtagcggtaggatgtccttcggtcaaagtaccggttttatccagtaccaccacatctaccttacgcatctgctccagagcgacggcgtcttttatcagaatatgctgtccggcagctttaccgattcccaccatcagcgcagtaggtgtggcaagtcccagagcacagggacaggctatgaccagaacggatacagcagaaagaataccataagaaatatactcactgccaccgatagctacccacagcacaaacgtcagaatggcaattcccaacacgacaggaacgaagatgcctgtaatacggtctacgatacgctgcacaggagctttgctgccttgtgcttcctgcaccatgtgaatgatgcgtgccagcacagtatcacttctcacctgagaagcacgaatgatgaaggaaccgcgctgattgattgttccggcaaggaccttatcgccctttttcttctctaccggaatcggctcaccgctaatcatactttcatccacatacgaatcgccctccgaaagctgaccatccacgggaatctgttcgccgggacggactaccaccatatcgcctacctgcaacaggtctatttgtatctcttcctctaccccgccacgcaatacacgtgccactttaggctgcattcccatcagtttgcgaatggcatccgaggtatttcctttggcgcgttcctccatcatctttccggtcagaacgaaggcaatgatcactgcggaagcttcgtaatagacgtgcggttccagtccgcgatctgtccagaactgcggaaagaaagtgttgaacaaactgaaaaggaaggctatcgaggtactcaacgcaaccagcgtatccatattgctacgaccgatcttcgcctgtttccatgcccccgtgaagaaacttcctccgaagagcaccattaccggaatagcaagcaacatttgtatctcgttagagtatggcatatgcattaataacatcgaaaagataagcaacggcactacaaatatccacgcgccgatcactttccgtttcagacgaaggtagcgcttatgctgttcttcttcccgacgttcttctttattcgcttcttctactatcagatcataaccggcagcaagtaccgctgcacggatttctccgggggtgagcttgtcgtcctcataagaaatcgtcaatgtatttgaagcaaagttgacggaagcatcaacgactcccggcaactttttcactgtcttttctacattgttagcgcatcccgcacaatgcatattaagcacgggaaacgctttttttgctatattacccatataatcctttactctttaattaattagtatttataaaacaagcaaatacgggtatttgttcgattacttcttatcggccttcttatcctctttcttagattcttgtttgctatctttcttgccgtcctgcttggtttccttcacaaactcggcctcataattgaacttcttgaatcctgcctgcaacttcttcacatctgtcttttcggcatcgtaggtgatggacacggttttgttcttcagttcggtggaaagttccttcacgcctttctcgaagcgcatgttatttttcactttcttctcgcagttctcgcagtgcatctgagagactttgaatactactacacggatatcctttgccaacacggctgctacgctcaaaagagccaccacgcaagtggccatccatctttttattctcatttttcttattcgtttaatggttattattcatttcttgccagattgaaacgtattccgatataggcttttgccccgtgcacaggtccccatatcatcgttgagtcgaagtttcctccccacgggtttgctgcgtcaatgatcggattcttctgtttgaagtttgtcaggttctcccctcctatgtagacagaccagcggcggaaatagcgggtaatctgggcactcagttgctcgaagctgccatagcggcgctcccaagatagctgaccgtctgccaactcataaggggaaggcattcttcctccgccattgagctgaagcgtagcatcaaactgccatattccgagtggagtctggtacgaagcggtcagcagtcctttgtatttgctggtcaacggtttctccatccgttggcctttgtaggtggtctgagcatccgtcagacggtaagctcccgtcaaggtaaatcctttaaagaaaggatagcttgcctctacttggaatacatgcgaataggaacgcccgtccagattgtaaaaggctacttcgtgaggattactgtccatatccactacgacttgcttcaggaagtctgtgtaataatattcggcattgatattcagcgttttgccaaatacaggtacgtaggtagatacactggcaccatagttccatgcttcttccatgtccagtcctttcgctatttcgacctttcggctactggaaagcaggtagttattttctgccagtacatgattcgtacgataaccttttccggcagagaggcggaagtgtacgtactcattcggattgtatttaagatgtgcacggggagtcacaaagaaaccgtgctcattgctatagtcaccacgcagacctgccatcagcatccactgatcattcagattcagcgtgtattgcgcataggctccgggaaccgcttctttggcaaaagccttgatgagcggcaattccgtttgattctccaaccgataatgctggtcataagcgtcatagttgaaactcagccccgccgagaaactgttctgcttattaaactctgtttcaaacatcaaagaggcatacacatttgtctggtctacattgtatagttttcgtccgtacatggcatcctgattgtgccaactggcagaaagaatcagtgccagattcgtattcttctccttattaaatatataagcattcttggtgaaaagttcgtaacgttcggtatcgattcctactttataaagatcacccgtctgcatatccgtatgatgtgcctgcccgctagtgcgactttcggaaagagccttgaagcctgcctgaaagacataatgatctcccatataggcccatcggttccacacgttatactgctctacttgggggatatccacgaagccgtcatcattgccgtcgtgcgctttggtttcgttttcataatgcgccaataaagaggtactccaacgttttgacaactttaaggtggcgtccgcattcgcctcataccggttggtactgcttgcgaaaagattggcagatacccaatcggcctccggcaactgcggctttttgaactctacattaatctgtcccgtgatggcttcgtaaccattcttcactgatgagattcctttggaaacctgtatgctttgcatccacggaccgggaacatatcccagaccataaggagatgccgcaccgcgatagttcgggatattctccgtgagcatctgtacataagttccggacaatccgagcagtttgatctgcttggctcccgttgccgcatccgaatagctcacgtccaccgaagggttggtcacgaaactttctcccagattacagcaggcagccctgctcaattcggcactgcttatcatctcttcgttcatcacgctgctgcgcaacttcatcgttcccattctgcggctgactacattcacttcgttcagttctacaccttcccgaagggtaatgtccagttcctgattcttcttgctgacatgaatcgtgtcattctgaaaaccgataaaactgattaccagcatgtgactcttcgaaggtttggagatagaaaagctgccatcttccttggtagttacaccctgacccgtattcacccagaatacattagcacccggaacaggctctccggtattatctttgactattccccgcacctgcgcttgtgtcgtaactgcaagtaatgagaacagtcccattattatatatttcattctttcttggacttagttttgcgatacaaaattaattcatttctcttgcaactgagttgcattcattctccttgttttcataccctgcaaaggctgaaaacaaagtacaatcggacaaaaaagatgaaataacagctaaatcagaaaaacggaatgtaacgccagcttctgcctcggacagggagatggcggagaaggaagactggaaaagtccaccgtccggtctatagaagtgaaagcaaatagctgacaatactgttcacagaaaagtgttatcaccggaacggaaactgtcagttcggaaatatgcttcatcaaatcgggcttatagatagttgccgtacagcccttttctctacaatctttctttgaatcgcaagtatgagacttcttacatttgggacagccatcggcacaacagccctgcacagtctcacaacgggaacagcaataatgaacaatagatactcccgcccctgaatagataatcaggagagaaaggatcactgctgttatgtaggctagtctcttcatttcgggagacaaagataaggtattccggcaacaatatcaaattaaataattctccatttttattcgtactactgatattatccgtatatttgaccacatattagttcttttaaatacatcatgtcatggaatatcatcgtatatctttcatccacaacgatacagagtattcgttcattaaagctataaacgggaacttaacaggatacgctttaatgtcagcttgccggatagaagtagtcaattatatgaaagaaaataacttgaaaggcagctatatactaaccggaatgtcaaaggcttaatcacatgaaagctaaaagagagcagatattaatcagaacttcctggattagtactattggtaatgccatactttccacatcaaaaatcatcgtaggtttatgggccggcagtcttgccgtgctaggcgacggtattgattcggcaacggatgtgatcatctccattgtcatgattttcacagcacgcattatcagccagccgccttccaagaagtacgtattcggctatgagaaagccgaagggattgcgactaaaattctttcgcttgtgatattctatgcaggggtgcaaatgttgatatcatctatcggaagtatcttttccgaagaagcaaaagaaattccgtcagccattgctatatacgtcacgatcttttcgattatcggcaaacttctcctggctttatatcagtacaaacaagggaaaaagatagatagctccatgctgacggccaatgccatcaatatgcgcaatgatgttatcatttcctccggtgtgctgctgggactgatattcacgttcatattcaaactgcctatactcgactccatcacaggactaatcatcagcctctttatcataaaatcttcgattggcattttcatcgattcgaatgtggaattgatggatggcgtcaaagatgtcaatgtgtacaataagatattcgaagcagtagaaacagttcccggtgcgagcaacccacaccgggtaagatcaagaatgatcgggaatctttatatgattaccctcgatatcgaggtaaatccgcagataaccatcacacaggcccatcagatagccgacgctgtggagaaaagcataaaaagctctatagacaatgtctatgatatcttagtacacgtggaacctgccggcgaatgtcagacagacgagaaatttggtattgacaagggtatggtgaattgacggaaggcgttaaggagcaagtatatgctcccccgaagctgttatgattactccaccacaatcactgaccaccgtctcgtgctttccatccggagtgactatgatggaaccagtctgtatgatatgctttccgtccatcgtcacacgtatgcgggcgcttgtttcttctttttctttcttttccttctttgcagattcctcctcttccttatcctctatggctctgttccggtccatacagccattggtatgataacttttcatcttagtcacccggtcatcaacgaaccagatattaacgactcctgcaatacttgactcggaagtacgaaattccagcatctcactctcttcgtcaaaacttcgatagctcggtttacccataatggctattacttctttagaagacatcccacgttggataatactcaaattctcataagtaattctgcttgcataacaactgctgagcaatatcaccagcagcaaagacataaggatctgactctttttcataataggtatagtttagtagtttttttgaataccccaaatgtagtatgagaaaattcccttcgcaaagacttcttcctacttgcaaataggaatttccctatctatgaaaaacgacaggtataacctatgactactaacatttcttctctcaactatcctattggcttatctatcataccgtccgccacagagaatcaatgactgcataccttactgatatcaaccgtaaattcctcaccggcaggcatgaacttcccttttcgtttaagaaatccgatcagttcgtccacttccatattatctgccgaacaagtataaaaacgctgatgttcgccaaacttctctacgattgcagccctcagagatgcctcagtataactatttccctccatcatgtgaaggacttcgtgtgcatgtaactgttccataatctattttttctgcaaagataagtacggcgtacagattaaaactgtaacatatgatacagaagcaagaaaaaaagaatcattaacaatggcatcccctatatacattgccggagaaagtagctgaatatttttccttttttattcgcagtattcggtaatttcatttatatttgtcgatagtgatagatatgatcaatgttgaatttatagaaaaaacgagtatgaaaaaacaatatgtcagtctgcttgcggttatactttcggtaagcggctttttgttttcttgtcatgacaagatgaacaaaaacacgggagcattacaattcgatagtatacaggttaacgagacggcacacctctttaatgacaccgccaaacccgcgtgcaatattatcatcaacttcgcctatcccgtcaagtcgtcggacgagatgctgaaagacagtctgaacgcttacttcatctccgtctgcttcggagacaaatatatcggcgaaaagccagaagcggtagtgaagcaatacgccaagaattacattgacgagtatcgccacgaccaagagccgatgtacgccgaagacgaaaagaataaagaaagcgatgcagtggtaggcgcatggtactcctattacaagagcatcgaaagccacgtgcaactttatgagaaagacctgctagtatatcgcgttgactacaacgaatataccggaggcgcacacggtatgtatatgtcgactttcctgaacatggatctcactctgatgcgtccgctccgcctcgatgatatttttgtaggcgacttccaggaagccctgacggatctgatctggaaccaactgatggctgacaacaaagtaactactcacgaagcgctggaagacatgggatatgcttcgaccggagacatcgccccgacagagaacttctatctgagtaaagaaggtatcaccttctactataatatatacgacatcacaccgtactcgatgggacctgtcaaagttaccattccatactctatgatggaacatctgctgggcagcaacccaattcttggagacctgaaagattaaacagctattaaaagattgaacaccaatgaatatcctgttgttattgccccgtgtgatgcagaaggatattcatttcacttataaatcaaaattcaccattcaaaatacttaaagtggaaatcatactgaaatattttccggatctgacggaagagcagcgtaaacagtttgccgctctatacgacctctacatcgactggaatgcgaaaatcaacgttatctcccgcaaagacatcgaaaatctgtacgagcatcatgttctccattcattaggcatcgccaaagtgattcaattccgtcctggaaccaaggtcatggatctgggtacaggaggaggatttcccggcattccgctcgccatcctgttccccgaaaccaagtttcatctggtagacagcatcggcaagaaagtacgtgtggcgacagaagtggccaatgccatcggactgaaaaacgtcactttccgtcatgcccgtgccgaagaggaaaaacaacagttcgatttcgtcgtgagccgtgccgtaatgcctttggcggatctgatcaagatcatcaaaaagaacatttcccccaagcagcagaatgcattgcccaacggactgatctgtctcaaaggaggcgaactggagcatgaaacgatgccgttcaagcataaaacagtcatccacagcctgagcgaaaacttcgaggaagagttctttgaaacaaagaaggtagtatattcacaaatataggaatcaggagttatcaaaaccatgaaaataaagagatttgagtttaatatgtttcccgtaaattgctacgttttatgggatgacacaaaagaggcggttgtcatcgatccgggctgcttctacgaagaggaaaaacaagcactaaagaagttcatcctcaccaatgagttaacagtgaaacatctgctgaatactcacttacatctggatcacatcttcggcaatccgtttatgctgaaagagttcggtctgtcggcagaagccaataaggcggatgagttctggatcgatgaagctccgaaacagagccgtatgttcggcttccaattgcaggaagaaccggttccactggggaaatatctgcatgacggagatatcatcactttcggacacaccaaactggaagcaatccatgtccctggacattcgcccggtagcctggtgtattattgcaaggaagaaaactgcatgttctccggtgacgtattgtttcaaggcagcatcggtcgtgccgatctgtcgggaggcaacttcgacgaactgatcgatcacatttgcagccgtttattcgtacttcccaacgagacagtcgtctaccccggacacggtgcgccaacgactatcggaatggagaaggcagagaatccatttttcagataaaaaaagaatacaagtattaggtattaagtattaagtattaaccgtagcttctggcatatttatccgcatggataatacttaatacctaatacttaatacttaaaaacatcccccataaattatgaaaacagatttgttagctagccgtcacatcggcatcaatgaagaagacacagctgtgatgctccgcaaaataggcgtagactcactggatgaactgatcaacaaaaccatccctgccaacatccggctaaaggaaccgctggcactggccaagccgttgacggagtacgaatttggaaaacacattgccggactggcaagtaaaaacaaactgtatacgacatacatcggattggggtggtataatacgattactcctgccgttatccaacggaatgtattcgaaaatcccgtatggtatacttcttacacgccttatcagacagaagtgtcgcaaggaagactggaagcgttgatgaatttccagactgccgtctgtgacctcaccgctatgccgctcgccaactgctcactgctggatgaagcgactgccgccgccgaagccgtaaccatgatgtatgctctgcgttcgcgtgcccaacagaaagcaggtgccaacatagtctttgtggacgaaaacatcttcccgcagaccttggccgtaatgaccacacgtgccattccacaaggcatcgaattgcgggtaggtaaatacaaagagtttgaaccctcaccggaaatcttcgcctgcatcctgcaatatcctaactccagcggtaatgtggaagactataccgacttcacaaagaaggcacatgaagcagactgcaaagttgccgttgccgctgatattctgagtcttgccctgctgactcctccgggagaatggggagcggatatcgtattcggtacaacgcaacgtctgggtacaccaatgttttacggtggtccttcggcagcctacttcgccacacgtgacgagtacaagcggaacatgccgggacgcatcatcggatggtccaaagacaaatacggcaaactctgctaccgaatggctttgcagacacgcgaacagcatatcaaacgcgaaaaagccacttccaatatttgcacggctcaggcattactcgctacgatggcaggtttctacgctgtatatcacggacaggaaggaatcagaacgattgcttcgcgtattcatagcatcactgtcttcctcgacaagcaattaaagaaattcggatatacgcaagtcaatgcacaatatttcgatacgctacgtttcgagttgccggaacacgtttcggcgcagcagattcgcacgatcgcactaagcaaggaagtgaacctgcgctattacgagaacggagacgtaggtttcagcatcgatgaaacgacagacgtagcagctacgaacgtgttgctttccatctttgccattgccgccgggaaagattatcagaaggtagaggacgtgccggaaaagagcaatattgacaaagcactgaaacgcaccacgcctttcctcacgcacgaggtgttctccaactatcatacggaaacggaaatgatgcgctacatcaaacgtctggatcggaaggatatttcattggcccagtccatgatttccctcggatcgtgcacgatgaagctcaacgcagccgctgaaatgcttcctttaagccgtccggaatttatgagcatgcatccgttggtgccggaagatcaggcggaaggatatcgtgaattgatcagcaatttgagcgaggacttgaaggttattaccggatttgcaggtgtcagcctgcagccgaactcgggtgctgcgggagaatatgccggtctgcgagttatccgtgcgtatcttgaaagtattggtcaaggacatcgcaacaaaatattgattccggcttcggcacacggtacgaatcctgcatctgccatacaagccggatttgaaaccgtcacctgcgcttgcgacgagcaaggaaacgtagatatgggcgacctgcgtgccaaagccgaagagaacaaggaagcactggctgcactgatgatcacctatccgtcaacgcatggtatcttcgagacggaaataaaggaaatctgtgaaatcatccactcttgtggcgcacaagtatatatggatggtgccaacatgaatgcacaggtaggattgaccaatccgggatttataggtgcagacgtttgtcacttgaatttgcacaagacgtttgcttcaccacatggcggcggcggtccgggtgtaggccctatctgtgtagctgagcatctggttccattcttgccgggacattcgatcttcggcagtacgcaaaatcaggtttccgcagctccgttcggcagtgcgggtatcttgcctatcacatacggctacatccggatgatgggtaccgaaggcttgactcaggctactaaaatagccattctcaatgccaactatctggctgcctgtctaaaagatacttacggtattgtttatcggggagctaccggtttcgtcggacatgaaatgattctggaatgccgcaaggtacatgaagaaacgggtatctcagaaaatgacatcgcgaagcgtctgatggactacggctatcatgcaccgactctctccttccctgttcacggcacattgatgattgaacctactgaaagcgaaagcctggcggagttgaacaactttatagacgtcatgctgaatatatggaaagaaatccaggaagtgaaaaacgaagaagcagataaaaatgataatgtattagtcaacgccccgcatccggaatatgaaattgtgaatgataactgggaacattcctacacacgtgagaaagcagcgtatccgatagaaagcgtgcgtgagaataagttctgggtgaatgtggctcgcgtagacaatacgttgggagaccggaaattattgccgacccgctacggaacgttcgaataagaagaagctttcaaaggaaatccgtacatgaaaaaataagcccggagctcagcaaatgtgagctccgggcttacctttgttaagcaccgagcgtattccaataagcaccgagctaaatgaacataagaagcgactccgaaaccttacggttatcatgctgctcttcattccattccatgtttgtcgaaaacatagtctggttctatctgacaacagtcactgttccggcttttaccattttctcccttagtgagattttaggatcaacatatcctaaagctacacagccatatactttatgattctccggtacacccaaagagcttataaattcacgaacttcgggatcatcgcaagtcgtacccaactgattgatccagcaagatccgattcccagagaatgggcagccaaaaacatattctcaatcgcgcaggcacaatccatgccggcccaccattgagtgggttcgttggacacgatcaccaaagtcggggcatgataataacagcaatacgccttgctatgaccacgttcctgtaatttcggttcatcgcttttagcaaaagcgcctttaatccgttcattcaattctgccagtttatctgcattctgaatagcggtaaaatgccatgtctccaaatgcatcccactgggtgcaaaagtggcagcttccagaatagcctgtaagtcttcttccgaaacttgccggtcagtataagcccgtacactacgacgtgctttgatattttctaaaacttcattcgttttcatatactatatttactatacttacaactcgttcaccacttgcatttatcgttttaccaatccgatctttgcattcagtttgaagtaatacgtaccgttctctctttccaaaaagccgtatttgtctttatccagagaacctttctccaaacgggtattcaggaacaggaagtcctccataaccggtttctctgacttgtgatagcaaagaacttccccactcccatccatcaacaggataccttcaacagccgaatcctgtccagtatatatctttgccggacgcatacccaaggctaatgccatcaggaattgcttcactttaaactcatagaaaccatgtttgtttaccaattcatcttttattttcaacgggttcatctgtttgattacttccgtcagttcactgatacgggtgatgtcgtccaagtgcatgatgcgcaccatttctgtcagcacacgaggaaagtgtaagtcaatcattaaaagattgctacggaatacccgatctgccacgtccgagtatttgagtacaccacccaagcgctcaatcagcaacattcgttctgctacttcattaggggcttccggcaacgcattaatcttattcaccgtaggtgttgcaaatttgactccgctctgttccagtttcaagttagccgcacggcctccgtccaacagcggattcatagcacccaatcgcgaacgaacgctgaacccgctcaacggtgcctccggatgccagaaggcaatataaaaatcggtacgatcttccgtcttcgcttccagatcgaaaattgcgacttcatccaaaaactcttccactccatccggagaagtgacttcatcctccgaagaggacttgacagcctgcaaaatcaaatctgccacaatcccaaaatcttcccggggaacggatttctcactattttctcctttgatgcggaccatctctttttctatatagtagcagcgtgttccgtcatgttcctcccgttgaatcattgcaataggccagtcgatttctcctttctttgccttagccgtacccaacgttacttttccttctgtcagcagacggaagaaagtatacagttcacaccattctctttttgttgcttcaaatgccatatattcttatttttctttattttactcttcatcaagaatccttgcggtctccactttctccaatcgtgcacgcagtttgggcatcatggaacgacgaatacacaacgtcatgctgcaatccatatcgtacgattgactgagaatttccggttcttcctcctttacaatacgcatgatatcgttcataaaaggatattcaaacattacggtcacttcttcatctaccgttttttctataatggtagcggcagatattgcttcggcagcagctgctttataagctacaatcagtccgctcgttcctaacttgattccaccgaaataacggactacaataatcagaatatcagtcagttcattagagttaatttgcccgagaatgggctttcccgccgttcccgaaggttcaccgttatcattggctcgaaaatcctttcgcgctgcacctaacatataagcatagcacacgtgccgtgcatcataatacttcttctgatacgtttcaagatgcgcttttatctcatcaagggtacgcacaggcaaggcgatggcaataaacttgcttcgcttttctgtataaataccttcggaaggttcgacgatagttttataagtatcttcagcagtcatgccgcaaagatacggctttcttgacgaaattccatctgctgttcgaaaatattaaagcttctcattgaaacgagcgcttcatttcatgcagtcaaacggtcgatggggtgcaatcaagcagtcaattggaggtagtcgggtggtcgttttaacggaatcgggcggtcatttatacaaaaacaagcggtcaatctctcacaaatgtcctgttgattgtgagagattgaccgctctattttctatatagaatatgtcttaatccaacttatggataaccaatcctgaacgaagtttcggttcaaaccaagtcgttttgggaggcataatgttgccagtatcggcaatatccatcaattgcttcatggatacgggataaagagccagagctactttcatttctccactgtcaacacgcttcttcaattctcccaaaccgcggataccgcctacaaagtcaatacgcttatccgaacggaggtctttgattcctaaaatctcatctaaaatcagattggaagaaatagtaacgtcaagcacgccgataggatcattgtcattgtatgtacctgcctttgccgtcagactataccacttgtcgccaagatagagggagaaattgtgcaaaccggacggtttatagatatctgtacccttttcttctacaacaaaattcttatccaatgcagcaagaaattgttcgggagtcagcccgttgaggtcttttactacacggttatagtcgatgatagtcaattgattggcagggaaacatacagccatgaaatagttatactcttcatcgccacgatggttcgcgttttgctttgctttctcggcacctacaagagcagcagcagcggaacgatgatgcccgtcggcaatatataatgccggcattttagcaaattctgcagtaattgcagcgatatcttcgtcctggtcaacaatccagaaagtatgtccgaagccatcacccggagcgataaagtcgtaaacaggcttttcggcagtgtatttccgaatgattgtatccaatttcgcattatcgggataggcaaagaatacaggttcgatattcgcattgttcacacgaacgtgcttcatacggtcttcttccttatcacgacgggtaagctcatgcttcttgatgataccgttcatatagtcaggaacataagcgcctactaccagtccatactgagttttcccgttcatggtctgggcatagatgtaatagttttcctttgcatcctgcactaaccagcctttatcctgaaacagccggaagttttcggcagctttctcataaacacgttcatcgtgttcatccgtaccaacaggaaagtcaatctcgggcttaatgatatgataaagggatttttcatttccagctgcttctgtacgcgcttcttctgagtttaatacatcgtaaggacgggaagcaacctgttcaaccaggtcttgtggagggcgaacgcctttaaaaggtttgataatagccataagtcatggtatgttttaagattagtagaacagatacgccctcgcaaaagccgagggcgaaatctgataacatatttctaaatatactgcttaatgaccagcacctatcatcaaataagtgactgagcaacgataagcagtcttacgattcatctcattatttgtttactctgaacttctcacagccgtctttcaggaaaccgacaatctgttgagcagcagcaataccggcattgatattcgcttcggcagtctgtgcacccatcttcttcggagtagagaaataacgccctgcaaacttctcagcaaattccgcattagcagcaggcatgatatctgtcatatacttgaagtcggcacggtcttccatcaatttgatcagctcggcttcgttgatcacttccttgcgggcagtattcaccaacatagcgcctttcggcatatctttcagcagagcgtagttgatagagttcttcgtttcagcagttgccgggatatgaagagacactacctgacaagtcttgtacagttcttctgcagagtcaagtgccttcacgccatctttttcgatcacttctttcgggcagaaagcgtcgtaagcgtacacttccattccgaagcctttagctacacgggcaacgttacgaccaacgtttccgtatgcatggatacccagtttcttgcccatcaattctgtaccggaagtaccgttatagaagttacgaacggcgtataccatcatacctaacgccagttcggcaacagcattggagttctgtcccggagtattcatcacgcaaacattgtgagcggtagcggcagccaggtctacattatcgtatccggcaccagcacgaactacaatcttcagttctttagcagcatccagcacctctgcatcaataatatcactacggataatgatagcattagcatctttcactgcatccagcaactgtgctttatcggtatatttctccagcaaagcaagctcatatccggctgcttcgatttctttacggataccgtctacagcaactttggcaaacggtttttcagtagctacaagtactttcataatttatctgtatcttttaaaaaagattcaccacagacttcaccggcctacacactatattcaataagatttcagtgtaaatccgtgcaatctgtggtgactctatttatattattaatgaagtttttcaaattcctgcatgcagtcgatcaaagcttgtacactttctttcggcagagcattgtagcaagatgcacggaaaccacccactgaacgatgtcctttgatacctaccatacctttttctgtagcgaacttcatgaagtcagcttccagatccttgtattcgggagccatcacgaaacagatgttcatgcgtgaacggtcttctttggcagcagtacctacgaacagtttgttacggtcgatttcagcgtacagcatatcagccttttcgatagcacgacgttccatttctttcacaccaccctgtgccttaatccaacgcaggttcaacagtgcagcatagataggcactaccggaggagtgttgaacatagaaccgttatcgatatgagtctgatagttcagcattgacgggatgtaacgagaaactttacctaccgcatcattcttcacgataacgaatgtaacaccggcaggagccagatttttctgcgcaccaccatagatacagatatatttggaaacgtcgatcggacgagagaaaatatcagaagacatatcggcaaccatcggaaccggagagttgagatcttcttttaattctgtaccgtaaatcgtgttattggtagttatgtggaaataatctgcgtcagcaggaattgtgtaatctttcgggatgtaagtatatgtagcttcagcggaagaagcaacttctacgacttcaccaaaccccttagcttctttcatcgctttctttgcccacacacctgtattcagataagcagcctttttttcaaggaagttgaaaggtaccatgcagaactccatactagcaccaccaccaaggaacagtaccgaataaccttcggggatattgagtaattccttgaataatgcctctgcttcgtcaaccacaggttggaagtctttggcacggtgactgatttccatcagggagagaccagagccgttgaaatctaaaatagccttcgctgtatcctctatcacctcacgcggaagaatggaaggtcctgcattgaaattatgctttttcatttgaagtttgtttttggtttaacatttcgttagtttatgtcttttgaccttgcgaatttacgaatttatttccggtgcacaaatctttccttataaaaatactgttctaaagcagatttctctttctttttattggtttatacaagatatatacaccatattgttatccatacatatcaagcaagggataaaaggtgaaaatataacctgtgggaaataatcggttatagagtgaaaggaaaacggttataaaatgaatatttattaagaaagacagagaaaaacgaggatttctcaccctaacaagcgacgagactaaaattataaaaataagtcagaaagaaaggagtctccaataccttcctaaaagaaaagaaatggagactgtcacagaaatatttttctactatcattttactctgtcatccggggaagatatctcccacttcagaaaagtgatattatttgtaatgacaaagccgatcatttcgtcattgcagcatcccaatcacctatttggttcttgaaattcccctttcagctttgagaacacctgttgtttttcggctccctttatttagcttcctcaatgatagtcttcattcctttgattttttccccttgaataagattcaggagttgcttcacttttgcccgacgaacggcaacaaaagcataatgctctttcacatcaatcgcacctacatcttcacgcgtcagattacctttcttataaaggaatccggcaatgtccatccggctcagtttctccttctttcctttacctatatatatagtagtccagactgatttgggaggacgcgaaggattttccggcagttccatcgtttctatatcttcgggaatatattcaggtagtttctcttctgtgtgaagaatcagataagaagtacctgttgcatcccaacgtgccgtacgtccgttacgatgtgtaaacgcttcttcgttcacaggcagatgatagtgaatgatgtgctctatctccggaatatcaagtccacgggcagcaaggtcggtagagatcagtacatgacagcttccgttacggaacttatacaatgcccgttcccgatccggctgttccataccaccatgaaaacgttcggctgatagtttcttatcttcgagcagcttatgcacacgatccaccgcatcccgatgattgcagaaaacaatgctggaactgcttcccaatgtacaaagcaagttgtaaagcgtagcaatcttatctttggaaggagaaagcaccttcatcagcttcaaccggttttcctgttcttcggttgcctccggaagaaaatccagtttgactgtccggttcagtcccgtaaactgaggaatttcttcggcatcagtagccgacagcagcatacgtttctttaatcccggaagctgggtaatgatctctgccatctcatcatgaaagccgagctccagcgatttatcaaactcatcgataatcaaagtctcgattgtttcgggatcaaagttccctttggacagatggtcggtgatacgtcccggagtaccgataatgatggcaggatgatttcctgcaatgcttttcttttcttcggcaatgggatgcccgccgtagcagcaacacgttttccaggaagttcccatgctccggaatacggtatctatctgtaaagccaactcacgggaaggcaccagaatcagcacctgcacgctgtcatcattcggttttaggataagcaacagaggcaaaagatatgccaacgtcttacccgatcctgtcggtgacaacaggataacatctttcctgcccgtgccctgttcgagcgcagcttcctgcatcgggttcaaagattcaatcttcaaattctgaagagcggactgtattatttcatttttctctaacatggggacaaagatacaaaaaggacgaaaagattcggtaagatagtgcataaagaaagcgggaaatctgaaaagcaccattgtcttttacagatttcccgccagtttctttatgttactcttccggtcctctccgaccggaaatcaacttccgaagattatcctccaaagttatcgaacatcaggttctgagccggaacgcccagatcgtcgagcatcttctctacagctttcgacatcggaccaggaccacacatatagtattcaatatcttcaggtgcttcgtggttcttcaagtaagtttcataaattacgttgtgtacgaagcccggagtatatttcacaccggcagcatcagcggcaggatccggacggtcgagtgccagatggaatgtgaagttcgggaaatccttttcaatttgcaggaagtcttccagatagaatacttcgttcagcgcacgggcaccatagaagtatgacatcttgcggtcggtcgtatgcaatgttttcgtcaagtgcatgatctgtgcacgcaacggagccataccggcaccaccaccgatccacatcatttccttgttagagtcgaaaatcggatggaagtctccataaggcccactcattattaccttgtcacccggtttcagcgtaaagatataagaagaagcgatacccggcattacatccataaatccgggaccttgttctttcggcttgaacggaggggtagcgatacgtacagtcagcatgatacggtcaccttctgcaggatagttggccatagagtaagcacggattgtttcctcttcattcttacatttcaagcccagcaaaccgaatttctcccatgcaggcagatattcttcaccgatcaggctcttatcaatgtccttatcataatccattgagaatttaggtatcttgatctgtgcgtaagaacccgggataaagtccatgtgttcgcctttaggcaatgccacgataaactctttgataaatgtagccacattcttgttggagatcacttcgcactcccactctttcacgccgagtacagactcgtcaatcttgatagccatgtcactcttcactttcacctgacagcccagacgccagtggtcttgttgctgtttacgactgaagtgaggaacttcagaaggcaggatttcgccgccaccttcgagtacctgacatttgcactgtccgcaagaacccttaccaccacaagcggatgacaggaatacaccgtttacggccagcgtattaagcaatgtggaaccggactctacttccagtcctgtttcgccattgatcgttagtttcacgttacctgacggtaccagaaatttcttggcaaccagcaagataacaacaagcaacagaataaccacaaggaataccccaatgcttgataatattaaattcatatccattgtcttattcctttctttttagatgttcaaacctgaaaaacacataaatgcgattgccatcagacctacagtgataaatgtgatacccagacctttcagcggagcaggtacatcagagtaagccattttctcacggatagcagccaaaccgacgatagccagcagccagccgatacccgaaccgagtgcgtaagacagcgcatcccatacatcaccgatgtatttcggatcgcttgcacccagattgatgcgttgttgcataaacaaagaagcacccatgatagcacagttaacggcgatcaacggcagaaagatacccagtgaagcatacagcgacgggctgaaacgttctaccaccatctccaccaattgcacgataccggcaataacggcaatgaaaagaataaaactcaggaagctgaggtcaacaccttcaatgatagcgttggcagccagcaccttggtttgcaataaatagttcaccggaagcgtaaccagcaacacgaatgttacggctatacccagtcctacggcagtcttcacattcttcgatacagccagatatgagcacatacccaagaagaacgcgaatatcatgttgtccacaaagatggagcggacgaataaacttaataaatgttccatatattttaattaaaaattaagaatgaagaatttcgagtttatgagtgttaccttcattcatccttcttcacccttcatttatattaattactttcttcttgcagttctttgtgacgtgcacgctgataccagatgatgcaagctacgataatcaatgccatcggcggcatcaacatcagaccgttgtttacataaccgatattctggataggctcataattcaggatattgaaaccaagcaaagttcccgaaccgagcagttcgcggaagaaagctacgattaccagaatcttggcataacccaaaccgttaccaactccgtcaaggaatgattcccaaggaccgttctgcatggcaaatgcttccagacgtcccatcaggatacagttggtaatgatcaaacctacataaacagagagctgtacacttacatcgtatgcaaacgctttcagaatttcactaacgatggtaaccaaagcagcaaccactaccaactgaacgatgatacggatacgatttggaatcgtcttacgcaacagtgaaataacgacattggcaaacgctgtaatcacagtaactgaaagtcccatcacaatggcgggttccagcttggcagtaacagcaagtgcagaacagataccaagcacctgtacggttaccggattatcgattcccaacggagcagagaatacttctttattcttctttgaaaacagttgtcccatattctttatcctcctccttattatttagttaaaaaacttatgtaattattcagacaagccttcagcatagcatccacacctaccgaagtgatcgtaccaccagagataccgtccacttggtaatcagctttttctaccttgccattcttaacaacacccagagcaacggcaccgttttccagtgtcttcttgcctgcgaattcatgctggaaccagtcagtagcgatttcagcacccagacccggagtttcacttgcgtgtgaaaagtatacaccgtaaactgtgtctttgtcctcgttcagagcaacgtatccccagataccgccccaaagaccggcaccgtatacaggaaccacatatttagtctgaccatctacatcacatacaaatacgtgcagacgttggtgttctttcacttctttctcgtagttagtggcaaactcacctgtgttttcagtcagcgtgccgtctacgttcatcagcatatcaccttttacatatttctgatattcggcatcagcatcttctacatttttaatgttcaatgcagcaagaatctgctttttagtgtccaactgcacattcttgtcttgtgtagctttcagtgaagaactaacgaatgccagcaggaatgcaacgataacaaccattaccgaagcataaatgatagtataactattactatttgtattcattttcattcggtattattggttagacttaacagcgcgtttctcgcgacggctgatattactctgtactacacagtagtcgatcagcggagcgaagatgttcatcagcaggatggcgagcatcataccttcgggataacccggattcagtacgcggataacgatagccatcacaccgatcaggaatccgaagatgtatttacctctttccgtacgtgcggatgtcacagggtcggtagccatgaatacggcaccgaagcagaaaccacccaatacaaggtgctcgtaccaaggcatctgagccattgtgttgttttccatgccgatagcattgaatacccaggccatgaatgcaccaccaacgaatacggaaagcatcgtcttccagcttgcaacacctgtccacaacaggataacggcaccgatcagaatggcgatcacacttgtttcaccgatagaaccgggaataaaacctgttatcatatccatgttgaatgcaggaaccgtgcccgatgtagcagcttgtcccagcggggtagccacagtcagaccgtctacagcctgtcccataccaaaaatggtatcgccggatacccaaacggcatcaccggacatcttggtaggatatgcgaagaacaggaatgcacgggtgatcaacgctacgttgaacacattcatacccgtaccaccgaatacttcttttgcaaagataacagagaatgcagttgctacggcaagaatccaaagcggacagtctaccggaacgatcatcgggatcagaataccggaaacaaggaatccttcctgaatttcctccttcttccattgagctacgacgaactcaatacccagaccgacaacgtatgatacgataattttaggcaatacagccaggaatccgtagataaacatttcgatgaagctgccagtagcacctgtgtgggtgaaatgctggtaacctacgttgtacataccgaacagcagcgccggtactaacgaaataaccacaatcgacataatacgcttgctgtcgatcgcgtcgtgtatgtgcgttcccgttttcgcagtcttgctgggcacgaacaggaatgtttcgaagccgtcgaacaccgactggaatgcgtggaatttaccgccctcttcaaagttcggctttatcttatcgagataatttcttaacgctttcattaatatattactattttacgatttacaatttacaatttgccatgcggattatgccatttcagcacggagcatgtcgagtccgacacggacgatgcgttggagttccatcttcgaagagcagacgaattcgcagagtgcgaagtcttcgggagccacttcgtagatacccagcgcttccatgcggtcgatatcaccggcgatgatcgctttaatcagatattcgggcatgatatccatggggaataccttatcatattcgccggacatgatcatgtggcgttcgccgcctttgatacgtgcatccagcgtatattcctttttgcccatcaaccagctgaaatatgagtggttggcactgaactggttgaagcgcggcatgatccatccgaacatttcgtgaacgtcatcaccttcggggattacagtcagttggctgtggaaagcacccaggaatccgttaggagaaacttgtttgccactcagcacgttaccactgatgtagcgcaaatctttgtcagttgttacgtttccggcaaatacgttagtcagcaatgcacctacctgaagtttgcagtaagcaggtttcaacacttcggaacctgtcacggctactgtgcgggtgaaattcacacggcctgtattgaagagacgaccgatgaagataacggcttgcggatcaattgtccacacagtttcgccctttgaaacggggtcgaggtggttgatctgaacgcctacgttaccggcagggttcggtccgtcgaaagcggtgattgtaacgttcttagcctgtgtcagtgcagcggctttctgtttcacgctgatgctcaggtaagtttttgccattttggcgagggcatcaagacctgtctggaagtttgcttcttcgcctttcagagcaaattcgaagtcgggagccagcggattggtatcgaatgcggaaacaaagatgcccttcggtgttaccgtcgggtctgcaatgatgtcatacggacgttgcttgataaacgcaaacagacctgcttcaagaagcgcggacttcacagcatccgcatccatagaggatacgttcttcttaccaaattcttcgtagtcctgctctgcggcagcttccactacgatgttcaataccttacggcgagcaccacgttcaacgctcgtcactacgccactcacgggcgaaacaaatttcacttcaggatgatacttgtcgataaacaagggtccaccggccatcacatattcctgctctttcacaaccactttcggtgtcactccaggaaaatcatcgggtacgagtgcgtaaaatcccggctctttcactgttgtgtacgtctcagcagctttacctttcaggtttatgtcaaggcctttacgtaactttattacatttgccatgctatataaaataatggtttcataaaatttgccgcaaaagtaataaataataatgtgattcgggaggaaaaaagaaaggaattacggaaaaatatccgtaattccttttgtgttcgcacacgttctttaataaagtaggctggaagacctgcgcgcacaagtctatgcaacgtgattgtcggttggttattcttcgccggcaaacattggatcccacgccggcaggcggatcggtttttgtttcaagacttcgagtgctttcggggtcacgtatttcgtttccacaacaagacggaaggtatattcgttgaaccattcgtcggtcatgatgagatgtccctgatagccggctccggcaccccaactattttcaaccatccatttggtcggttttccgtttttgtccagatcgactgccatgagggtcatggcgtgactggagctgctggcaaagctttgaatacgctgcttcttgtccatgccgaaggtggtgcccatcaatgagtcgtaatcatagtttttgacgtcgagcagaccacggtcagagttcaggaacttgccgacgtcgcaggagtaatacatcatggtgctgtctttcagagaggcgatggccatctccttgatgtcctcgatcgggaggttgacgtatgtccagttcttgccgtcgtagcggtggcggtcgtagtctatttcataacatttgtagtattcgcggctgggatcgttcatgagcatgacgtagttgtcaatcagcttttcgtcaccgtatttcttcaggaaagaaagcggggtgtaggtggcggtttctacaggctcgcctttgacattatattgcgtccaggtaaattctgtgggaggtacgcccaagttcaggacaagcatacggtaaatggtgctcaacatttccactttagcgttctctatagcggtaggtttggcttttttcgaggccatgtcacggagctgcaaaccctgttcgcgaagtttcagagcgatcagactcgccatgcgggctgtgttttcgctgctgttcgtttcgggcatcacgtctttggggacgagaccgtatttgcttacgatgtccgctactccggtgaatgtgccgccgtcgctcaacggattgcggaacagccattccaccattttatcgttcataggcttgtcgctggtatcgatgactccttggaggaaaaggttggccttttccagctggtcgaaaaagaaaggataggtttgcgagaattcgaaagaccccagattgtatttatcgatggctttggcacgcattacgttcagaccggtgaagagccagcagcgtccggacgatttctggtcggtgatccccttggagttcactttgacagaaaaatgtgtatccatccccttcatgttgtcctggttcagggcaagcttgcggatgtcgttgttgctgatggcgttccggatagccttgtcggtagaagtaccttgataactctgtttgatttgctgcatcatgtcagtgctgatgccgcctttcgcgtcctgtgcctgtgcagaatagtaaagggcacagcaaacaaaaactgataaaattcgtttattcattatagatcgtttataaattaactttgcctgtatgctaatagtaatccgttggcaatttcgttttacatattattaattggcaaaaatacgattcttttttagatttattatctatgagaatgaaaactaatcgaaataaaatagtttcctttgcagcggatttcaagaaagaatatgaaaagatatataataggtgtattgatgatgtttctattcatcaatattttgttagctcaaacggctgacacggcagtaaaaagcgatgaactgcaaacgactacaacttctgttgacgaagtcggggtagccccgacagattccacccccaccctttccaaaaaagaattgcgacgccagcgtgtagccaaacgtaatctacattataatatattaggtggccccagctatactcctgacttcggattactgatcggcggtagtgcattgatgacgtttcggatgaatccgagtgatactacccaacaacgttcggtggtgccgatggccatcgccctgatgttcgaaggaggactgaacctgttcaccaaaccgcagcttttcttcaaaggcgaccgattccgcatcttcggagtctttgcatataagaatacactggaaaatttctacggcatcggatacagcaccaacaaggactatccgcgtggcgaagacaccagcgaataccgttatagcggtgtgcaggtgaatccgtggtttttattccgtctggggaaaagcaacttctttgccggcccgcagatcgacttcaattatgacaagatcactaaacctgccgcaggaatgatagagcaaccatcgtatattgctgccggcggtacggatcacggctactctaacctcagttccggagtcggtttcctgctgacgtacgacacccgtgacgttcccgccaatgcttatcggggaacgtatctggactttcgtgggatgatgtacaacaaagccttcggaagcgataataatttctaccgtttggaaatagactaccgccaatacaagaccctaggcaaacgtaaagtattggcttggacagtgcaaacaaagaatgtattcggcaatgttccattgactaaatacgcactcagcggcactcctttcgaccttcgtggttattatatgggacagtttcgcgacaagtcatcccacgtgatgatggcagaataccgtcagatgataaatacggacaaaagcaattgggtgaagaagatgctgaatcatgtaggctacgtagcatggggaggatgcggcttcatgggccctactccgggcaaaatcgaaggtgtacttcctaatctgggactcggtttacgcattgaagttcagccccgtatgaacgtccgtcttgacttcggcagagacatggtgaacaagcagaatttattctatttcaacatgacggaggcattctaaacaagtatttgctcataattaacaagaaagatgataaaatgcttccataagaacatcattaaataaaattaatccttatatttgcgttgctataacacagcaaaagcagataatagggttaatttatgaaacaaatcagatacctcttcggaggattactatttttgtttgcctccactggaagcgtaactgcgcaagaggtaagcgattactcaaaactacaaccaagtgattattccagcattacacttccaccgctggatcttcttttcgagaacgcaaaaagcgctccgacctatgaattagctacagtaaaagaacaaattgaacggaagcttctggcaaaagagaagcgtgccttcttaggctttttcagtttacggggcagctaccagtatggtatgttcggtaacgagtctacttatacagatgtagcaattgcaccttacctgacctatgcaacacaggcacagaacggatatacagtaggtgcaggagtcaacattcctttggacggtctctttgacttgacagcgcgggtaaaacgccaaaaactgaatgtacgtaccgcccaacttgaaagagaagttaagtttgaggaaatgaaaaaggaaattatccttctatacgcaactgcgacctcccaattaaacattcttaaacttaatgccgaagccctcatgcttgctaatgtacaatatagtatagctgaaaaggatttctcgaatggagctattgattcgggaactttatcatctgaaaaatctcgccaatctgacgcacaagagaaattcgaaaacagcaaattcgagttaagcaagagtttaatgatacttgagttagtcacccacactcccattttaagaaacaaataaacatacatttatggaatacatcctttatatcagcagattcctatatcgtatccgttggtggttactaattggaacagccattataacatttgctgtttactattttggaaaacgcatgataggcaaaacatataacgtagaggcaaccctctacactggcgctgcttccggctacaatctagaaggtggaaataacaaagtggattgggcgacaactcagaacgctatggataacctaatgaacattatcaaggctgaaagtacactcaaacgggtatctatgcgattatatgcccgaagtctgatcaaaggtaatccaaaagaagacaatgaattcatcaaagccagcaattacaacagaatatatgaacacctaaagaatagtccgaacgggaaagaaatactgtcattaatagataaaaacagcgaagataaaacggtagccaactttttcaattacttgagaccgactcaagcaaactatctctatggagtattctattataatttgccctattactcttataatgatctcagagcaatcagagtagcgcgtaaaggtgccagcgatctgattgaaataagttatacggcaagtgatccgggtatcgcctataataccatcgacatcctgaccaaagaatttgtaaacgaatacagtgcaatccgctatggtgaaacagataaagttatcgaatattttaaaagcgaacttcaacgcatcggaaaggaacttcggcttaaagaagactcactaacgcaatataacgtagaaaaacgtgttattaattattacgatgagaccaaagaaatcgctgccatcaacaaagagtttgagttacgtgaacaaaacgtactgattgcatacaatagcgccaaagcaatgttaaacgaactggaaaagcaaatgggcagcaatgccaaacatgtaatcaacaatcttcagttcttggataaactaaatgaagccgcttcgcttacaggaaaaatctcagaaatggagacgatttcaagtgatcatcagaatcaagaagcctcattacaggaatataggaatcgcttaaatcaaacacgcaaggagctttccgagctttcaaataaatatgtagagaacaaatataccaaagaaggaatagctaaagagaacatcatagaacagtggcttgaagtaaccatgcaatacgaaaaagccaaatcagacttacaaattatacagcaaagccgtatagacctcaacgagaaatacagacagtttgcaccagtaggttccactatcaaacgtcaagagcgtaacataacttttatagagcaaaattacttgtctgtattgaaaagctataatgatgccctcatgcgtagaaaaaatttggaaatgacctccgctgcattaaaagtattaaatgctccggcatatccgatcagtgccatgcccactcctttgaaaaaaatggtgatggcagcgtgtgccggtaccttcatatttattttggggttcttcttaattcttgaattattagaccgtactctacgcgattctattcgtacacgtcgtttgattggacttccgatgttaggcgcctttccaaaagactctattttagagtatcacaattatgttgaagaatcaaaaagtatagctacaaaacagttaagcaatagtatccttcgtttctgtcagcaaaagaaagaaggattgccctacattatcaattttattagcacagaaggcggggaaggcaaaagttatgtgatcgaagccctaaaaaaatactggaacagtatcggacttaaaacaaaagtaataacatggaagtcagacttcagaattgattcacgagaatacaacctggccaaaagcattaccgatctatacacatcagaggaagaagatattctcatcgttgaatatcccaatctgcgggaagctagcatatcgctggaattactacaagaagctaatctaaatatactcgtagcccgtgctgaccgtggttggaaagagaccgataagcttttgtcagaaaagctaagtcaacaagtaggtaaaactccactttatgtttacttgacacacgcatcccgcaatgtggttgaagactacactggtatgcttccaccatatacactttggaggaaaatagtataccgactgtcacaattagcattgacagaaagtatatttacgttcacaaaaagaaagaagcagccggcaacatcaggagatgaagatgacgaatgataaaggaaaatacagtcaatacttaacagtagccggtaactattttgccaataaaggatgggtacatttactattggcaggaggattgtatatattatacaaaatgttctttcgtacttcccttcctttctttctgacgattagttcattgcctttaatgacagttattttcttattaattatcaaatattcaaagcaaagtttctatacacttttcattctccaattcctgctggcagcagcttatgcagtgacagacataccattgggagtagcaacattaatgtgtacattgtttgccgttgttttgctcattgcgtacggaatgcatgaaaaaattgactggtcggaaagtcgtaatggtatgcttatgctttttctgatatggggagtttattgcatattagagatagctaatccgaacaatgttcaggcagcatggaatatctccatcacccattatctcatatatcctattgtatgtgctgtcatcgtaccgttagcaatccgtaacatcaaggggattcagtggcttctaattatatggtctcttttcatcctcttggcagcagccaaaggatattggcaaaaaaactgtggttttaatgaacgtgagcagtattttttatacgttttgggaggagcaagaactcatattatttggtccggtattcgttatttctcattcttcagtgatgcagcgaacttcggcgtacacatggctatgggtgtttcactttttggaatttcacttttttatataaaaggtgtatggctgaaaatctattttataattgtcattattgccgccatttacggaatgggaatttctggaacacgggctgcgatagctctgcctatcggtgctttagggagtttcattattctttcacgcaatcgcaaagcatgtattacaggtatttcagttcttgccttgttattcttgttttttgtatgtaccaatataggagatgacaatcaatatatccgcaagatgcgttctgcatttcgtcctagccaagacgcttcctatcaattacgtgtagacaatcgaaagaaaatgagagaattgatgattcacaagccttttggatatgggatagggttatccaaaggcgaccgtttctatcccaaagaacgtatgccctatccaccggattcctggttagtctcagtatgggtagaaaccggaatcatcggtctagttctctacctggctgttcacggagtcctttttgcatggtgcggatggatactgatgttcaagatcatgaacaaacgcctgcgaggcttacttactgcctggctctgtaccgctgccggattctatctggcagcctatgccaacgacgtaatgcaatatcccaactccatccccatatatacggccttcgccctctgcttcgcaggaccatacatcgacaaacggatgcagcaaagtaaagaaacagaactgaaaaacgaacaatagattatgatgaacgaacctcaagtctcctttatcacagtttgctacaacggctttaaagacacttgcgaattaatagaatcgctgcaaacacatgtacattccgtgagctatgaaatcatcgtcgtagacaatgcttcgcgcgaagacgaagcggctaaaatcaaggagctatattccgatataatcaccctgcggagcgagtcgaacctaggcttctccggtggaaataatctggggatcagagtagctaaaggagcctatatctttctgataaacaatgacacttatgttgaatcagacggattccactacctgacagagcgactggaaagtcagaaaaacatcggagccgtctctccgaagatacgctttgcctttcctccgcaaaacatacagtttgccggattcacccccctgtcggcaatcactatacgcaacgaaatgacaggtttcggctgtccggacgacggcacgttcgacaccccgcacacgaccccctacctgcatggggcggcactcatggtaaaacgtgaagtcattgagaaagtaggagaaatgccggaaatattcttcctgtattatgaagaaatggactggtgtacacagatgacaaatgccggttacgaactatggtatgagcctcgttgcaccgtcttccacaaagaaagccagagcaccggacagttcagcaagctacgtaccttctacatgacgcgcaaccgtttgctctacacccgccgcaaccggaaaggtgctcaacggctgctctccattctttatcaatctaccatagctgccggaaaaaacagccttcagtttgccgtgaaaggtcgtttcgatttatttgccgcagtatggaaaggcgttgtcagaagcttttctgtcacctctcctatccgataacccttaaaaatgaaagaccatgtacacctttattgactggattctctttattcttctggcactttgtgtcggttatctgctcttctacgccattgcctccaaattctatcgtccgcgaaaactttccgaagcacgtatcctgcgtcgttttcttgtactcttccctgcatacaaggaagacagggtgatcgtctccactatccgtagtttcctcgaacaggaataccccaaagaaatgtacgacgttcttgtcatctccgatcagatgcagccggacacgaatgctgccctacaaacactccccatctgtttgcaagtagccgactataccaatagttccaaagccaaagcccttacgctggcaatgaacgtcactgccaacgaatcttatgacgtagtagtgatcatggatgccgacaatgtaacgactcccaatttcctcgcagaaatcaaccgtgcttttgagtccggcctgcatgccgtacaagcccaccgcacaggaaaaaacatgaatacagacatcgctgttctggatgcgatcagcgaagaaataaacaacggattcttccgtagcgggcacaacgcgataggattgtcagccggattagccggttccggaatggcattcgacgttcattggttccgccgaaatgtaggacatctgcaaacatcgggcgaagacaaggagctggaagccctgttgctaaaacaacgcattcatatcgaatatctggaacaactgcctgtatacgatgaaaaaacacagaaaaaagaaggtatcaaaaatcagcgtaaacgatggattgcagcacaatacggtgcattgcgggcttccttgcccgatttcccgaaagcactgattcaaggaaatatcgactactgcgacaagattcttcaatggatgctgcctccccgtctgatacaactggcgggagttttcggtttcactttactctttaccgcaatcggcttactaatgagtctgcaaagcggaggatacgaatggtatacagccatcaaatggtggatactgtcagccgctcaagttgccgccatgatcatacctgtgccgggaaagttgctgaaccggaaattaggaaaagcaatcctgcagattccgacactggcactggcaatgatagccaatatgttccgactgaaaggagcgaacaaaaagtttattcataccgagcacggagaagaataaggccttcgtcaagcccactcctcctccgcatcaaagcacggacaagccttcacccattcctccggctcgatctccccgttcccgttcagatcagggctcaggtcacgatgtccacacacccggcaaccgggataatcacgcaacaacgtaagcacaagcacatgcatcgagtgtatctgccattcggtacgggtatcggcaggccgcccgtgacagtcaagtccgccctcatagcaaataccgatacttgtctgattaaagcctttcgcatgagctcctatccgttcaatggggcgggtagtcttgatgtcgccatttttccggatataaaagtggtagccgatcccgttaaatccccgccggcggtggcacacttcaaggtctgtttccgtgaaatccctgtccgccctagaggcggaacagtggatcacaatcaggtcaatcttcctcatcgacctgccctttcgttcgttttccttttctcttcctgcggaagaaaaacaggatttccaatgcaatctccaaaatcttgtcaatcataacttttcatttttacaggttattcatttacaggtagtacacatcaatgatgctgatgtacttaccagactaaacggtaggatcgggagcttcctcctcccctccatcgccaccggaaccggaaccgctgccaccgccactaccggagcctccgccatcaccgttgcctcccgaagccggcgcattcttggagatgagttcgaagaccatgttattgtccccgccacgtgtggtagccgtgctgtcgttggcaagccgcagagaattatcgaccttgaaacgaaggttgacacgagtaatattcctcaccgtacagtccttttccagttccacaccgggacaagtaagcgtggtatagaaaatccccaagccatcaacttttaccttattccccgctacgagcaccttcttcatcgaacggacaaaggattgcatcacgtgctccacatcttccaccgaaagcgaaccgatcgactcgatctcacgcgccagcgactcgatagaataaagtttcgattcccccggcttgggtttgagcacatacaccatcggcgatttgtcatcaccaatcttttttttgcgctgatagcgcaccacagacactgttgccatactgaatttgtattaaagaaaagaaggacattctccctttctgttggtgaaacaaagatacggcagtgcatcggcgatttcccggattacaacggactgcaccggactatgacgggataaaacggataaagacggattaagacagcataaagcagaataaagtgaattagaaacagattgaaagcatactaaaagcgaatacaaagtaaccataaagcagataaaagctgaaaaagctcccaaccaaccccgaataaacaccccccaaaaagacaagcagacaacgtgaataacaactaaataatacaagcataaaagcaacactttcatgagcaacaaatttgctaaatccagtaaaaaacagtaactttatacccattacaaaccctacaattaaatcaaaaatgaaagcaaatacagataccctgcaaaaacaggaagaagaaaaatccttccaataccgcagctacggaaaaggagaactcgccatgctatatatccccaacgtccagcaacaaagcgcagtagaccgcttcaacgaatggatcgaagccgcacccggactaaaagaacgcctgctatccaccggcatgaatccccgaagcagacactacacacccgcacaagtacgactgatcgtagaggtgctgcaagaaccttgaagataagtattaagtattggtgccaatcagcagttaaaacaaaataagaatagttccggacaagatacccgattaacgtataaagctgtccgaaaagtagataaatactatcaacctatcattcagcacacggagaagaatctcttctttgactaatataaagagctgattcttcggcagacttaggatgacagagcaaaacgatagcagacgttctcttttcggacagccccattcaatatcattttccggctcactcggatgagcacgttgcttttcagccgtgtctcttaatgaaatttctgatcttcttcgataagttcctggctaaatttctccggtgccaaaggggtaaagagttctataagattttcttcgggatcgcgcaggtacagggtacgcatcccccaatcgggcatatccgtaggctcactgataaacgtcacgccttttgctttcagtgcgacaaaggtttcgtccacgttatccacactgaatgagatcattaatttttcacgcatcccaacaggctgctgcttatctgcattacctgccgagggcgccatccagtcggatacaaaaagggcgagaccttctattccgtcggctactttaaaactggcgtatccgctattctcatctccccaggccggctctaatccgagttgttcggtgtagaatttgaagcatccggcgaagtcctttactaataatcttacgttactaaatctcattgtttacagattaatggtttattatttgtttcttagaatcgaaatgcaaatataatcattctatcggatgacgtttcatgaatccgtatttacctcaaaactgtgcgaaaataaagtaaaccggtatcaaaatgaatcaccattcaaccagtgatccacatcgttactcatcccccgtgacctgttacccaccaccctcaccaactacgattattacctattacctattacttattacctaatacttattacctaatacttaatacctaatacttattacctattacctattcaaacagctccttctccggcaaccagcacgagctatcattgacagtgtttctgacccgttgttccggtgggacggacgggtcttgggactcttcgcaggggaggtaacgtccgctgacgggatcgtagacaaaagtagccacaccacccgttccgagatgtttgaacttcactttttcgacatagacacgtgtcactccgacctccttgtcacgctccactaccaagccgtaatccgccttgttgaagaaatcggcagacccgtttacgtcgtacatatccggacgcggagtatggttcgtcaccggattgcggttcatctttcgggggtgcgccacaagaatcaccagacagttatattgcgtggcaaactccgtaaacagattcaggaaattggaaagatactgcgtttccgattgccccggtgcgggggtatgctcaaaacggttgaccgggtcgaagacgaagatgcggcatccccgacgcaggacaagctcacgggctttggcaagcacccgttccggagtggcgctgcctttgagggcgatgtgacagacgttttcggcaagaaactcttccgaacggagcagaagtccttccgtcatgccgcaaccgttttgaaaacggcgtccggtcagtttctcgatcaacttgcggagatggtagacgataggattattctccggactgaaaaacgcaatcttccactgatggcgcatacagaggcgcaacaccagttcgtccagccattccgattttccggcccccggtatgcccgtaacgatgaccagccgcctacgttcgtacgtacaaatcttatccatctcctcccagcccgtctccgctccgggaccgaagccgttgtcgaacaatgcccgcaggtcttcgtgcagatcggcggcggtgaagatgccttcaagagggatttcttccgcctgctcgatggcgatgcgaaggctgtcgatcccatatttgacaagatgttcattggcatccttgcaccccggtccgtagacggccacacggcagcgttcggcacccagacggttgaccagttcgtcacgcagtttaagcccggcagagtcggtgtcaacggctatgatgatgtctttcagattctcgaagtgcgactccatgaagcggtcgagccacgaaaggttcgcgttagctccggcaggtacggagatcacgcttttgaatccggtggcaagggaggacgcggcatccagttcgccttcgtggatgatgcaggtgtcctgtcccagcacggaatcgatattgtagggaatcagttcggctccctgcaccattttgaaatttttggcaccgctgcggaacttggtgttgacgagtttcccgtcctcaaaatagttgaaacagacgcaccgctctttcgtgccggattgcgacatgaactcttcctgctccgtgatgcgcagaccggcgatgacggactgcggaatgcaacgcgtctctaccagccaacgctccgtagcttcggaaagcgtcgtcttcgaagcgtcgaacaccggacggtggaaatgctggggaacggcagatgccgcacgacgtttacgggcagcctgtcgctcggctttcgcacgctcttcggcatcgtcggggacgtagaagtcggctccgcaatggtagcaatggcaatgtcctgtgtcgatattgacccgcagcgaacggtcacgcttgttgtgcctcgtcgggaggcattgctcgcaaatggttttaacgacaccgctggtatgtctgcggacatcgacatgataattagcaaaatttctcatatttcttgtttctattcctccctttcgaaaaggagattttaagttgtattaataattcaagtttcgcaggttacctttgcgttatcaaaactatcttaattcccctccttcaggaaggaggagaataaaggtagaaccgactttttagtcaaccccaattgagatactattgtttgtcaatattataaagaacttgcgaaacttcagttaataatttttctatcagttcccaatgcaggcggaaagctaagcatcaatgggtaccgagctaaacaccgatgggcagcgagctgaacactgataagcagcgagccgagcataaacgagcaccgagccaagcatgaacgagcaccgagctgaaaggcaacgctcacgtagccggatgtcggagaaatccggagctaatttccccacttccaatgcacttcatcccacacggcagacctgtccggtcttggaggcgcatccttcggaatcggatgcccaagatacgtccgttgcccgccaatgagttgttcaaagcgatacagttcttcctcagctgcttgccggcaactgccgagcagccttttcttcagctcctgagccggacgtccgcccggagagaggtaattgccgaaatacagtttcacatccctcaaaaacagcaagccatcttccctgccaaagcgtcggatatgctctttaaaagcagcgatcacctcctcctaccgttccacgaaaagtttgcccatacaggagtgcatagccatcgactccatgtaactttccgattcggccatctgatccaccagcatctcccacggaagaaccggctgtaggggcaactgtcccctatcctccggtggaggaacaatctgaagtccgtcagaagcagcggcggcagagtgctctttctctgtcttttcttcgttactactgttgttgtctttgacaacagtagtaactcttctctcctcttctctactcttctggttttgattcggtttttcgcctttatccatcggtgtttccggtgtgcttcccatgcgtttcggacgacctccttttttgccgtttgccacattaatcatccgcctttcttcgagctttgccatcaccctgtccagataaggcgaacggaacatttgccgttcttcatcaagcacaaaaaggtcgaactcacggagaaccctttgcaacacatcggcatccaagtcatacatccgcgcgaaagcccccatacaaagcggacaacaagatgcttcataattgtccgctttacgcaaatgcgtaagaagcatcatatagattccgagcgattgcgcagcgtcaagttccatcatcattctgacaatattgtcattactcaaaaaatttacctctaaattaaaatactgatctttcttcatatcttacaattaattgactgtgattcaggatgtcccgaattcgttctgcaaaggtccgaatacttttttgaaaaactacttgcagaactgcaaacgatgtttgacatttttctatgaactttgcggcataattagtaaaaagaaaaaattatgaaaggatacgaaagagcgaccaaggaagaaatttacgaccggctgcgtattgaagcgaactgtcatgcacaaatagaacgaatcatccatttgcgccacctatgtaatctgaatcttgaagaggcggcagatgtgaccaatctcagtatttccaccctgagccggtacgaaaacgaagtgaccaaatgcagcgtacaaagtttcataacgatatgctaccactatcagaagtacctccataagcggcatatccccttcgacaggagcctgtttctcatagatatgaacacgcttgacaactaatagagtaacagagagataaaacggacgcacaaggaataaaggcacaacaccgaaaaaaagcaaaaaagatgaaaagtatcatatcttttattacctttgtatgtggcaaaagcccaccaaaaacaaagaatcaagcatgaacgacaatgaaataggcaatccaccgataaaagcattaatcgttttcagagagaatggagatacggacaatctttttgtccccattttatgcgatgctatcaggacgacggggattgacgtacgatgttccacgaatgagttctggaactcggatacaccttacgacatcatccacttccaatggcccgaagaggtgatggaagggaattgtgacgatccggacaggatttgccgcctgaaggagtgtatcgcttttttccggtcccgtggggcccggttcgtgtatacgcgccacaatgtccgtccgcatgatgcgaacgaggtgatcggccgtgcttatgacattatcgaagaacaaagcgatgtggtggtgcacatgggacgttacagtctcgacgaatttgcagccaaacacgcggacagccggaatgtcatcattccgcatcatatttatcaatacacgtacaaggagaacatcagtgtggaacgcgcacgccagtatcttaatctgcctcaggaggcgtttatcgtcacgtcgttcggaaagttccggaatcgtgaagagaggcggatggtgaccggagcgttccgaaaatgggatgaagcaaagaagttcctgcttgctccacggctgtacccgttttcgagattcaacaggtatggcagcaacttcttcaagcgctgggcatcccgggcaggatattacctgcttatacccttgctcaaccgcctgcgcagaatgcacgccggagctagcgacgaacctatagacaactgcgacctgccttactacatggccgcttcggatgtaatattcatccaacgaaaagatattctgaactctgccagtatacctctcgccttcctttttcacaaagtggtcataggccccaatatcgggaatataggagaaatcctccaagatacgggcaaccccgtcttccaccccgacaacaaatttgatatcatacgagcactggagacagcccgccaactgtccgcccgaaggaagggagaagacaactatgcgtatgccattgaaaacatgaacagcggaaaaataggaaaagaatatgcggagctttacagaaacctagccaatctctctctttaaacgatctcaaaaacaaacaacaatagagtagccatacacagtatttatggaaaatgaagaaataaaagtcagtgtcgtcatacctgtctataacaccgaaaaatatgttcgggaggcagtagaaagcattatgaatcagacactgcgggaattggaaatcatcatcatcaatgacggctccacagataacagtctgcaagttgtagaagaactggctgcggcagacagtcggatacaggtgtattcgcaaagcaatcagggattgtcaatggcacgcaatgccggcatcacgcatgcccacggaagatacatctatttcatggatagtgatgatctgttggaaaaggatgcaatggaactgtgctacagcaaatgcgaagaaaaagaactggatttcgttttctttgatgctcagagcttttttgaagaggatattcgcaatgctcccgtactaaattatcaacgtaccgataagttagaaaacaaggtttatacaggtcccgaagcaatcaacatacaattgcagcacaaaacgtacaccccatccgcctgcctgaacgttatccgcacagcttttttggaagaacgacagctcctcttttatccggatattgtacacgaagatcagctattcacgaccttactttatctgcaagcccgaagaacaagctgtatccaacgatcgttctttcaccggcgcatacgtaaaaattcaattatgacatgcgatttttcactcaaaaatttaaaaggatatctcactgttactcaagagatagtcaaattcaagcaacaaacctctgaaaacaaaatcaaagatactattgatttatatctgtcgcaaatgctgaatgctgtcatttggcaagcccatgtgcttccttacccatatcggcttcggctggcgtggcggtgtctgtttagatacaaaaaacttatatctataagaagcatcggagtcttgttattcaaatccatcattcacaagtagatcagaaaagaatcattcaggcaatggcaaacaatattaaacatcagttattttccggagttttctacacggcactagccaaatacagcggaatcattatatcactcgtcgtggcagggattcttgcgcggttgctctctccggatgacttcggagtagtggcaatcgctacggtcattattgcatttttcaatctctttacggatatgggaatatcgcctgctatcgtacaacataaatcattgactaaagaagaactatcggacatcttctcattcaccgtatggacaggcatcggaatcagtatactcttttttgccgcttcctggctgatcgccgattactacgaaagtgggatcttacggacgttgtgccagctcctgtccgtcaacctgttcttcgcctctgccaacatcgtgccgggagccttgttctaccgcaacaaagagttcaagtttattgctgtccgaagctttatcatccagatagccggaggtgccggagcaataactgccgcgctttgcggagccggcttatatgcgctgatcatcaatcctatactttccagcatactgatattcgttatttcctatcaacgctatccgcaacggctgcgtttcacgctaggactgaaagtactccgaaagatattctcctattcggcctatcaattcttgtttaacgtgattaactacttcagccgcaatctggataaactgctgattggtaaatatatgagtatgtctgatttaggatactatgaaaagtcctaccgcttgatgatgctccctctgcaaaatattacgcaagtcatcacaccggtcatgcaccccatcttcagcgatttccagaatgacaaggaaaagctggcaacatcctatgaacgcattgtccgttttctgtcattcatcggtctgccgctcagcgtactgcttttctttacggcagaagaagtgacactgattatttttggtgatcaatggctgccttctgttcctgtattccggatactgtcactttcggtcggtattcagatcatactctcttcttcaggctctatttttcaggcagcaggtgatacaaggagcctctttgtctgcggactcttttcgtccatactcaatgtgagcggaatgctggcagggatattctatttcggcacactgacagctgtagcaatatgtatcgtgataacttttactatcaatttcgtacaatgctattggatgatgtatcgagttacattccaaagaaacgcatggatatttatcagacaacttctttctccactccttgtcagcctactaataacagcattcctcacgcctatatattatatgatggaaaatatgaatattttcgtaacacttattgcaaaaagtttcgtaagttttattatctttgggacatatatgcaagtaacacacacctatgatatcacaggcaaagtgaagactcttgcaagaaatagaaagttagtacaaaagaacaaacaatgaaaggattattcctcatattccatggtttcgaagcattcaacggaatcagtaaaaagatacgttatcaagtaaaagccctccaagagtgcggactagaaatgcatacatgttggctagacgatacggacaaccataaacgccgtatggtagatgaatcgataatcgccgactatggtttcgggatcaaaggaaaaatcctaaaaagaatcgaatttgacagtatcgtacattatgtacagaaagaagacatagactttatttatgtacgctatgtccataatgccagccctttcagcatacggctgatgaaactgctaaaaaagaccggagcacgtatagtgatggaaatcccgacatatccatacgaccaagaatataagggcctcccattcgtataccaacgaatcctatttatagacaaatgtttccgacagcatctggcacgctatgttgacaagatcgtcactttttcggactatgacattatttggaatcgccccaccatccgcatctcaaatggaattgatttcagcgcaatccctttaagaggtccaaagaatgataccgcacattctctacaactgattgccgtagcgacaatgcacccatggcatggtttcgacagagctatagccggcatggcaaattactatcgtacacataccggcactcatgattataaagtatatctcaacatcgtaggcttcggggttcccgaactggtagacagctataaaaaagatgtagccaaacatcagttagagaaatatatcatctttcatagtgccttatacggcaaagaactggatgccgtgttcgagcagtcggacatgggaataggcagtctggctcgccatcgtagcggtattgacaaaatcaagaccttaaaaaaccgtgaatatgcagcaagaggcattccttttgtttattcagaaacggatgatgactttgagcatcaaccatacatacttaaggcagcaccggacgattcgccccttgacatcgaaaaagtaattcgcttttatcaatcattgaaaacaacgccgctccaaatacggatgtctatagagcaatcactttcatggaaagcccagatgcaaattgttattaatgaaacctttgaataaaactatatcactatgaatatacagccactgatcaatgctatccgctataaattgcgttatggcattactgtagaatggtacaatttctggtacatggctctcagatgccatcagaaaataactccgcaggtagcttccattgatgagaccattcggataatcgtagaagaccaatgttccgtgagccgtttcggcgatggtgagatgctgcttaccaacccggacaaggaaataggattccaaaaaggaaatgtactcttggctcagcgtctcaaggaagtattgacaagccatgaagaaggacatttggtttgtatctccgatactttcgaaaacatttatcgctataaccgcaaagcacgccgattctggagaactcacttctttctgtatggcagttggtgggaccgcttgctgttgcccgacaggctatactacaatacattcatcacccgtccctacatggacttcgcttccaaagaagactgcccacggtggtttcaccagatgaaagctatctggaaagacagggatgtcgtattcattgaaggcgaaaaaagccgtttgggggtaggcaacgacctctttgacaatgtaaaaagcatcagacgtattctttgtccgccccgtgacgcatttgaccgctacgaagaaatactgaatgaagcgcaaaaactcgagaaaaccgctctcttcctgattgctttaggacctacggctactgtactggcttacgatttattcaagtccggttatcaggcaattgacgcagggcacgtggacgtagaatatgaatggtggcgaatgggagccaaacggaaagtaaagctggaacgaaaatatgtaaacgaagccgccaacggaaaacaagtgtccgacgccggagaattttatcggaaacaaatcattgctaaaatctattaaatcatgaagatagcctattacctgccctcactacaggcacctggcggaatagaacggatagttacattcaaagccaattattttgcagaacattttgaaggatacgacatcaccatcattacatccgaacaaatgggtaaagcaccacactttccattatcccccaaagtaaagcatatcgacttaggagtatctttcgacctgccctactctcaatccatagtaagtaaagtgctgaagtatccgttccgctactatcggtttaaacaacgactatcgaatctattgaacgaactgaaaccggacattactatctcaaccatgcgccgggaactgaactttatcactaaattgaaagacggtagcctgaaaatcggagagtttcacgtcagccgctacgcctatggcgcagaagcactgaaacgtaaaagcccgattgtcaacatgataaagaaaagatgggcaaacagatttgtcaaaaacctgtctaaactgtccagagtgattatacttacaagtgaaggagctaaagactggccggaactgactaatatcagcatcatccctaatcctatttctactcctgtagaaggaaaacaaacagatattctgtcacataatgctattgctgtagggcgatatgcgccccaaaaaggatttgatatgctaatccccgcctggagcattgtcgcccaaagacatccggactggaaactacatatttatggagaaggcgacctgaaagagaagttcaccaaactaatagatgaactacaactaaataataattgtctgcttcatcacactgtatcgaatatagccgataaatactgtatgagttcgatatttgtcttatcaagccgatacgaaggttttggactcgttttggcagaagcaatgtcatgtggtataccctgtgtctcatttgactgtccgcatggtccttcggatattataaaagactatgaagacggtctactagtggagaaagaaaatatcaaggaacttgcagacaaaatctgctatctgattgagaatgaaaatgtacgcatcaagatgggacacaaagccagggaaaacgtaaaacgctttctgccggaaaatgtgatgccacaatggaaaaacttattcgaatcattaacttattcttctaaataacagaacaacatatggtaaagtggtataaaacttatctggaagtatacgggaaatcttttgatgagatttctgacgatagtatccgcaaagtcaaaagacaactcaaagaacgtcaaaacgattctccactggtatcggttgtactcattgcacacaatgaggaacgtcatctgataagttgtatctggtcactctccgagaatcattgccatttccccattgaaataatagccgttaacaacaattcaacggataaaacggaagaagtattaaaatcattgggagttacctattataacgaaacgaagaaaggtccgggatacgcccgccaatgcggattggaccatgcaaaaggaaaatatcatatttgtattgatgcagatactttatatccaccgcattacattgaaacgcatgtaaaatatctaatgaatccgaaggttgcatgtacattcagtttatggagttttatggttgacgaaagacattcccgattcggactatggtgctacgaaggcctgcgcgatatatacctccgcttacaagccatccagcgtcctgaactctgtgtgcgaggtatggctttcagttttaatacggaaataggacgtcggtttggatttcgtacagatattatccgcggagaagacggttcgttagcattagctatgaaaccgtatggaaaaatcgtatttattacaagtcgcaaagcacgagtgcttacaagtaatggaaccctaaattctgaaggatcactgattgataatatatggatacgggtaatcaaagcactgaaagaaatcaccggactctttatcaaaaagacggcatacaaagataaagactctaatctcatcaaataaggtctcatcaaaatcattatggatatggcaaaatatatagtaaatatcatcttagtaacagcttgtcttttcacctatacttcctgtataagaaaaatgaatctatacgatgagaatagaaatacaggacaagacaataacgaaaaagatacagattctactcccgtctatatgtatcctttcgacaaagaaacagcaaacgttacagcagaaatcattatccacacaaaaaaagaaatacagaccaaagatattaatgtcgaaatccctcatttaaaatacaataagacatggatgttgatgctaacacaagacgactgcatgcaggctgctttttgccgtacgtgggctgcaataaacggtaaaccgatctcaagttcaataccttatcctactccaactcccactgatcagaatatgaaacatcaattatattttgacatcaaacatttgcaaaaaggggatcttccccctactattatttccgccaaccaatctttgggatgtacagacggagcaggaaatgaagttcggtttgctattactaccactcttgcccctgaagaaaaatggatggatgctgaaacaaacgtactgccggggtttactgcaaactattatcgtttttatatgaaatccggacttatatgggataacatacgagagatgttgaactatggaacaggcattgccctccatgatgtaatgacaaaagatgctaatgatccaatacaaatattggaacattttgatattgcccaaaacattattgtagagaaactcacaggaaggggatgtaaatttcttgctgaacccaatggaaataaaacatacgtaactgctgctcttcaatgtccggaaattcaaacgatgaccgcacaagcaggagcaattaccctatatccgtatcaagtgtctgaaactttacaaaaatctctgatagaacgggagtttaacgattcaccagcatattttaaacaacagattactgacctgctaaaattacccaaagaagaacgtaaagcaatctgcataggtgttcatggtacggacaacaattggatcgactttttattatggttaaatagtaattatggtaaagatggggatgattcgttatggtttccaagccaggaagaatattatgaatataactattatcgtttaaacagccatattagtatagcacaaatagacgcaagttctttcaaattaacagtaaatttaccgggagaaaagttcttctactatccttctaccactatcaatttaccgggaattagcatgtatgacattgtttctatcgaaggaaatgatgcattgaccggactatcttatgctgactacagagacggtatcatgctcaatatcgactgtcggaaatacctgtttgaacacgccgagaatttcgtaaaacgatatgaggccaatccttccgatgcttccaacaaagcagacgccctctactttgtaaacatactgaaagaatcggctaaaaaagaggcactaaaaaaacgacttcaataagtaaatcaacaaacatctattaaacgagaatatagctatgaacgaaaccctcatcctcgaaatcatcttctggtccgccctgttcatggtgttctacacctatctgggctacggtatcgtcctctacgccctcgtcaagctgaaagagcttttcgtgaaacccgtgaaacgggtgctgccaccggacagtgacctgccggaagtaaccctcttcatcaccgccttcaacgaagaagacgtggtggacgaaaagatggagaacagcctcgccctggactaccctgcggacaaactccgcatcgtctgggtgacggacggaagcgatgacggcacaaacgaccgtctccaaacccgctggaacggaaaagtaaccgtctacttccagccgaaacggcagggaaagacagccgccatgacacgaggaatgacactcgtccggaccccgcttgtcgtctttacggacgccaacacgatggtcaacagcgaggcaatccgtgaaatcgtactggcttttcaaaacccgaaagtgggctgcgtggcaggagaaaaacgtatagccgtacagacgaaggacggagcagccgccggaggcgaaggcatctactggaaatacgaatcgacactgaaagcgctcgactcccgtctctactcagctgtaggcgctgccggagaactgtttgccgtccgccgcgaactcttcgaaccgatggaaccggatacgctgctcgacgacttcatcctctctctccgcatcgccatgaaaggatacaccatcgcctactgcaccaatgcctacgccatcgaaagcggatcggcagatatgggtgaagaggaaaaacgaaaagtgcgcatcgctgccggagggttacagtcgatctggcgtctgcgcccgttgctgaatcctttccattacggaatcctgagttttcagtacacgtcgcaccgggtattgcgctggtctgtcactccattcctgctgtttgcgctgttgccactgaatatagtcgttttgctattgggcgaatctcccctgttttatggcaccctgctggggttacagattcttttctacggaatgggatactggggatattacctctctaccagacaaataaagaataaagtactgtttattccctattatttcttattcatgaacgtgaatgtgctcaaaggaatcggctatctgaaaagaaaaaaaggaagcggcgcctgggaaaaagcaaaacgtgccgaaaaataagaacagagaatcaaatattttgctatctttgcatgaaacagaatcttataaatctaatcggacaagcatgaacagaacattacatgaggcagataatgcgcaaagaatactgaagttgaccgccgacaccatgctattagtcgatagaaatggcatttgcattgatattgatattcatagcaatttatggtttttacaagaagagaggctcttaggaaaaaatatattcgaacggatgcccgagcacacccgtgagaaggtttacagcaccttccagaccgtgcttcgggaacagcgaagcatcagcaagaactacaagctggaactggaggataatacctattatttcaagtgtatcatgtatccttacgatgacatggtgctctgccaatatcgggacatcacccagcgaagcaacgtgaaacgccagctggaacaggtgaaccgaaatctgagggagatacagaaagtggctcagatcggacagtggatgtacaacacccgcgacaatgtcttctattacatgggctacaccggagtattgtgcgaggaatcttccagaagcatctctctggagaaatatcaggaatttatcgtcgaagaagaccgcctgagcttcaccaactggtgccggaaaaatgaggaaggactcaacgaagatagtatcagctatcgggtccgtgtcgccggagagatttactatatgcgccttcaggcttatctgcgagacgaactaccgaacggcagctgcaacatcgaaggttacatccagaacatcaccgacatacagcgtcgcagaaacgacatcaacacgctaacgcacgccatcaacaacgcaaaggagagcatcttcgccgccaaagaggacggtacgctgatcttcgccaaccgccagttcctccacaaccacggcatcccggaaagtgaggagatcggcaaactgaaaatctatgaaatcgccggcgatatgaacacgcagaaagactggcatgaacgctgcaaggatatcctgcacggaggaagcagaagtttcgtcgcccatcatccttcgaaagtcagcaagaatatactggcttacgagggaatcatgtataacgtcaccaacgactccggtgaagaaagttactggtcattctcccacgacatatccgagcgactgcactacgaagcgcaaatcaaacggctcaacctgatcatggatactaccatcgacaacctccccgccggaattgtcgtcaaggagatcaacaacgatttccgatatatctaccgcaaccgggaatcgtacaaccggaatctgtgcatcggcgaatctatcggcaagaatgacttcgactactatccccccgaagtggcagaaaagaaaagggaggaagatacactagttgccaccaccggacggggactgcactggacaaccgaagggaaagacaaaaacggaaacgagatcatcctcgacaaacggaaaatacgggtggacggagacgaactttcctcccccatcatcgtcagcatcgaatgggacatcacggaactggagaagatcaaacgggaacttcagacatccaaagagaaagccgaaatgtcggacaaactgaagtctgctttcctcgccaacatgagtcatgaaatacgcacacctctgaatgccatcgtcggcttctcgcatctgatagccgaaagtgaaaataaggaagaacgtaaaacattttatgagatcgtcgaagccaacaacgaacgtctgctgcaactgatcaacgagattcttgatctttcgaagatcgaatcgggcattatcgagttcaccagcgcaccgataaatatcaacagtctgtgtaaagaagtacatgacgctcacgtatttcgcacgccgcaaggggtacaactgatctacgagccatccgaaaacggactggtgatagagactgacaagaaccgggtgttccaggtgttctcgaatctgataggtaacgcattcaaattcacgaaagcaggcagcattagttacggctataaactggtaggtaatcagatcgttttccacgtgactgataccggtacgggcatcgaaccggagaagataggacgtgtgttcgaacgtttcgccaagttgaacaactatgcgcaggggacgggactcggactgtctatctgtaaaacaattgtcgaacgattgggaggtgaaatctccgtttcttcggtggtaggtcaagggacgactttcacgttcaccctgccttacgagtcggaacaatcgaccggcacgggttctatgaagattgacatggcttctacggagacgtcagtagaaacgtctgtcaaggaggattctgaaaagacttccggaaatacggacgataatagttccgatagtatttccgccaatgcctctccaagccagcggactattctgatagcggaagatgaggacagtaacttcgatttgctgaaagctattcttggaagaaagtacaggcttatacgtgcacgggacggtatggaggccgttacctcatacgatgaagcgaagccggaccttattctgatggatatcaaaatgcctaatctcgacggtctggaggctacgaagatcattcgtgagctctctcctactgtgcccattatcgcacaaagtgcttatgcttatcaacaggatcagatcgctgcaacggatgccggatgcagcgacttcatcgccaaaccgatctcgcaagcgaagctcaaggatatgattaataaatggttaccataaaatgaaagccttatatagattactttactacctgtctatcctgctgacgagtattctggcaggtttcacattagccggagccttcgccggagatgcttcgccggacggctttaagctgatgccctttatcggattggttctgccgatacttttgctggctaatgtcgcctctgccatctattggacggttcgctggcgatgctgggttttcattcctttaatcgccatactgggaaattgggggtatctgacccgtgtcctccagttcccgctttttgattcggcttcccaaccgaatactgaatcttcgtttctgaagaaaaacgaaagggacaccgaatcagcactgactattgccacctataacgttaacagctttaatcacgagcacacaggtttctcatgcaagcaaatcgctgcttacatgaaggagctcggtgtagatatcttctgttttcaagagtttgggatcaatcatgaatttggtattgacagtcttcgcaccgttctttccgaatggccgtattactatgtaccttcttctcctgccggggagagtcttttgcaactgtctgtgttcagccgttatcccatcaaggagaagcagctcgtcacctacccaaattccaacaactgcagcctgtggtgtgatatcgacattaacgaccaaacaatccgtctgttcaacaatcatctgcagactacggaagtcagccgcaacaagcgcaaactggaaaaagaacttcgtgcggatgataccgaccgtgcggaacgtgccgctctcacccttgccgatggtctgcacgagaacttcaagaaacgtgccgcacaagctgaacatatcaatcaattgatttccgcttctccctatcccaccctggtatgtggtgacttcaactctctcccttcttcatatgtatatcaaacggtaaaaggagaaaaactgaatgatggttttcagacctgcggacatgggtatatgtacactttccgatatttcaagcatctgctgagaatcgactatatcctccattcgtctgagtttcaaggggtagattacttctctccggatttggagtatagtgatcataatccggtggtgatgagaatgaggttataaaccttacgctgtatatcactatatagaaaggctacaaaaaagccagttaactcattatgaattaactggcttcccattaaaataaaatccttctttttaactttaaaacttgtattagaaagtaacttttactcctaattgcatagaccatgcactaccaatggtattggtatattgccatgatgatctttctttaaaagcttcacgtgaattagcatttatctggtaagtcaagggttcaccaactttgctagcagtttttaataactgtacattgtcataactcttgagaccacaagattgatatgctccccattttgaattaatcatatttcctacattcagcatatcaaggctaacctgtattccatatttacgcccacctaaagttgcataaaaatcctgagcaattttaaaatcaaagcgattaatccaaggtgttaaagatccattacgttccacatattttcccttacgatctttaagataagaatcattgttcacaaaatcccaaaaatctttagcttgatctacagcagaataagtaatagcaccacttttatctgtaatatcaacaaaggtcatttcatcctgagagttaggcacgtatattaaatccgaataattgccatcaccattcatatcattataatatgtataggaataacgtcctgtatgatatcctgaataaaataacgagaacgttgtctttaagcatttagcataattaatttcataagaagcattagcaataatacgatggggcgtagaaaataaagaataagatactccaggatcattcaatgaatttactgccacattattttgccatgctgaattaggtgctgacccaggatttgcagtcagatctttagccattgtataagtatagccgatagaccctgtaaaaccaaaatcgtatttctttgtcaaaatagcattaaaagaatattgatatcctttatcttctccattagaaagttttactactacattcttaccattagtataatcattatactcgtatttttttgaagcccaataaatacgatccggttgttcattatacacacccgtaggctcagcctcattcatattgatctgcgcaacattataaatatctcttgtatacattgctccaacagataacataaaatcatacggcagttgaatatccacattcaaattactacgccaaacttgcggcatcttaaacttaggatctacatatgctataacatcaggtgcttgctctgaaggtgtagaaggaaataaactgggatatttctgcagagtttctctataattaggattaaaaccaaagtcagcaggtaaagagcccggatttttttgtgtattatactctaccatattttggtataagcccgaattacttggttgattagtgaaccatacaaaaggtaacaatccagtaaagattcctgtacctcctgatacaattacggagcgatcaccttttacatcccaattaaaaccgactcttggcgaaaacaagacttgcgtcttcggccacttagaaatatcgacatgagtattatttacaaaagctaattcctctattgacttgttagaatccaatgaattcatatatattggcatatccagacgtaagccataagtcaaacgaaaattaggagtaagagaccatacgtcttgggcatacacaccagccattccgaatgtcaactcagaacctggagcatcattaccattatacccatatgtaataccataaatggtaggtacttttccctgcataaaatcatccattgaatcataacgataatatccgtaagggcctctcaaataagaatttttaaaatattggcgttcaaaagaaacgccagcaagcaattcatgttttcctaatgatatactcacattatcaacaagactaaatacattattgataacctgattattaggagtaaacacttctgtacctaaagttatatattgctttccgtccttatatatatcgacaaaaggaaaatcagagcctttctgctcgcgtgtatcactaatatgagtatatgtggctaacagtttattctgaacattattcgagaaacgactatttaactcgcctgttatcgatgttactacgtttttcatcttatagtttgaattaccaaaagaaaaggcatccaaaccataacgattagaattagtactagttataatagtggacttagcgcttacttctctgtcatcttctgaggaaacagaattaaaacgcactgtcaacttatgattctgatgtatattccaatcaatacgagccattaacttccaattatcactttggaaattattgaagttctcatactgtccggggtcataatcatatttagttttaacaaagtcactgatagtacgcatatcacccacccaagtacgtgagatacgttttccgctatcccctgttccattttgatcttgattaggaagccaagttacccccggagtttccttattttcaatttcagcattcaagaagaagaaaagcttattcttaatgattggacctccaaaagttacaccatatgaatgagagttgtattcttttgctttaagaatatcctcaccgtcaatagagctccctgcaaatcctcttggtttatgataggtatatgcagtacccgaaaatgagtttgttccactttttgttacagcattaatagaagcacctgtgaagttggaatatttaacatcgtaaggagagacatttacagtaatctcatcgattgcatctaaagatatgggttgagaatctcctccaggtaaattattagaacttaatccgaaactattattaaacgaagcaccatcaatcgttatattgttataacgtccatcacgccccgcaaaagaactgcttccacctgcataaggagagagctttgtgaaatctgttatacttctgttaatagtaggtaaagtgttcatctgacgttcacttacattagtaacagtacctattttttcgatagtttttggtgctgttactactacttcatccaacaactctgaactttctttcaaagaaacattcaatacgtagttttctcctaatgacaactggatgcccttgtaaatggctgactgatagccgacataggtgatttcgactttgtaaggaccgcctgtacgcataccttgcagattgaattgcccactgacattggtcactgtaccatagcgggtaccggagggctcgtgaatagcaacgatcgttgctccaataataggttcatcttgtgctgttactttaccactcatacttgctgtggtaacttgcgcactcatcgtagcagtaatcagtaacattacgaccactaaaaaagaccgcattctcttcaacataatgtaatttattagttaatactaattgtttgtttcattgaaactgtgcacaaagataattaatattatttagacttagatgacaattatgctacattcttttaagagagataaacattttattgctttcgaaaacaataaaggccctgcaatgtttgcagagcctttcactttcgtatattaagtgagatttaacttgtaatctgtcagcaaatactagtcagtcattaggtttctataacgaacacgcttcggctcttcattgcctagacgcttcaatttgttttcctcatattctgaataggaaccttcaaagtagaatacattagagtctccttcaaaagcgaggatatgcgtacagatacgatcaaggaaccaacggtcgtgagagatgactaccgcacaccctgcaaagtcttccaaaccttcctccaaagcacgaagggtgttcacgtcaatgtcattggtcggctcatcgagcagcagaacgttaccttcttctttcagagcgatcgccagatgcagacggtttctttcaccaccggaaagaacaccacaaagtttttcctgatcggcaccggcaaagttgaaacgggacaggtacgcacgtgcattgatatcacgtccacccatacggatcaaatcattaccaccggagattacctgatagacgctcttgttcgggtcaatgtctttatgctgctggtctacataggatacctttacggtctctcctacttcaaactcacctttatctaccgtttccaatcccataatcagacggaaaagagttgtttttcctgcaccgttaggaccgatgacaccgacaatgccgttaggaggaagcataaagttcagatcatcgaacagcagtttgtcgccgtatgccttcgctacgtgttttgcctcgattaccttattacccaaacggggaccattcgggataaagatttccagcttctcttctttctccttcaagtcttcattcagcaacttgtcgtatgaattaagacgggcttttcctttcgcctgacgagctttcggagccatgcgcacccattccaactcacgttccagtgttttacgacgcttgctggcggtcttttcttccatttccatccgtttggtcttctgttccagccaggatgagtagtttcccttccaagggataccttcgccacggtcgagttcgagaatccatccggcaacgtgatcaaggaagtaacggtcgtgagttacggcgataactgtaccttcgtattgctgcaaatgttgttccagccagtcgatagattcagcatccaagtggttggtaggctcatcgagcaacaggatgtccggtttctgcaacaacaaacggcaaagagcgacacgacggcgttcacctccggagagattcaccaccggctgatcttcgggcggacaacggagcgcatccatcgcacgttccagtttactgtccagattccatgcatcagttgcgtcgatgatatcttgcaattctccctgacgggcgaaaagtatatccatcttgtcctgatcttcataatactcgggcaaaccgaatttctgattgatttcttcgtattctgccagtgcgtcaacgatcggttgcacaccttccattactacttcttttactgtctttgtgtcgtccagataaggttcttgtgccaaatagcccacagaatatcccggagagaagaccacttctccctgataggatttctccagacccgcgataatcttcaataaggtagatttaccggaaccgttcagaccgataataccaatcttcgctccatagaagaacgacaggtaaatgtctttcagtacatttttatttggttggaaagctttgctcactcccaccattgagaagatgatttttttatcgtcagccatatattaatgattgtatattgttgataatggcacaaagataagaaaaatgtttgaaatgctttggagttctaaaaaaatgttctacctttgcacccgcaattcgaaagaaagcataaaggattgattcagtagctcagcaggtagagcacaacacttttaatgttggggtcctgggttcgagccccagctggatcacggagtaaaaaaacctctgataatcattgattatcagaggtttttttattaatatacacagaacataaatataagactctacataaagcccaaaacatatccaatatcgaattgatgacaaacagacctacaccaaacaatcggctcatagaatgataaacttctttttccagttattgtttccatctttaccttatatattataaaagcgcagcaaagatacaactttaagaaatagcggaaatgaacatttgttaataaaaagatggctattccggacaactgtttactgaaaaaatagcttatttttgcaaagaatgcaagattagtcaaatggttgaatcagaaataaataaaagatattgccaaagctgcggaatgccgctccgcttcgacgtggaggaatatttaggcaccaactccgacggttcgaggagtgatgagttttgttattactgcctgaaggatgggaaatacattgtcgatatatccatgtgggaaatgatcgacatctggataaaatatacagataaatataatgaatacgcagacacggactattctccgaaagagctgagggagatactggacaaacgccttcccacactgaacagatggcggcaaaagcaagagacaagcagccttcatcataagatgattcagaacataatagtgtacatcaacggtcatctgacggaggtactgaataccgacacgctgagttcgatgagcggactgtccaaatttcatttcagaagagtgttccgcaccgctaccggagagaatatcggcagttacatacagcgtttgcgcatggaacacgttgcacatctgctgatctctacggactatacgctaaagcaaatcatagagcaaacgagttatcagactaaatacagtatcgccaaagcttttaagaaacattttggtatatcaacttctcaatacagagagaagcacagaccgaacggtgaaaatccggcaacaaacataaaaccggagataaaagtgatcagcccgataaagatattctgcatcgaagtgggtgaagcgtataaaaacaaactaaaatacagattactttggaataaactactgcatcatgccgaacagtatgaagcagacccacgatatgacaagtttatcagccttagcatggacgatccgtcgattacgcctacggagaagtgccggttctatctgggcatcacccttcgcgatgatactaaagcgagaccggtaccgggaatcatgcaaattcccggagggcgatatgccgtgttcagacatacggggagctattcttctttacacaaagtgtacaggagcatttatgaggaatggtttccgaaaagtaaataccatccccaaagcacattcagctttgagatgtatatgaatcatccgtccaccacggaaacgtcggaattactaacagaaatatatataccggtcatacggaaataatcaccattaaaacagaatctatggcaaagatatcagaaatcatgcttttacagcagccggaacagcctgctttggctattgaagtacaaaccaacatgaaaggtatgtcacaggctatcggagaaaattttgtaagaatagactctttattcaagaaacagggagaagtaaccacggatatccccttcgtagaataccccgactttgaaagcctgaccgaagatcgtatagaaatgattatcggactgaaatcttcgaaacctttacagggtgacgaaaaaatacagtctgtcatcctccccgccagaagaatagtcgtatgtctgcatagaggaaattacaatgaactggcacagctgtacaatgagatgaccgaatggataaaaacaaatggatataaggcttcgggaacatcaatagaatattattacagcaatccggatgtacccgaagaggaacatgtcacaagagttgaaatgcctttactctaaaagcaagagaatagttgccgtaaactcttaccaaacaataagaagcagagaagccgtcatacagtatcaccttgtctgataaagtaccggcattccctgcttcaatagttctttagaaattagccttgcgtttcttcacttcttctacgagtttcgtaaaggatttctccttcttacgtttttcatgttcggaagcggagaaatgccatgcttctcgtttgagtttcagataactctcatataccttatgatctaacgtaccattatgtaccgcttctaaaacagcacaacccggctcgtcgatatgcttacaatcgctgaaacggcatgattccgcatagtcggatatttcaaacatttcggcaagcgaatcgggattgtcaatcgccaaaccaaattcccgaacacccggagtgtcgattaaaacacctgagccatccaccaataccatttcccgacgagtcgaagtatgccgtcccttccctgtagacaggcttatatcggaagtattcagtaccgatttcccgcaaagggtattcaccagtgaactcttgccgacacccgaagagccgacaaacacgaccgtttcgccttttgttatggattcccgcaaccggagaatcgtttgaggttgacaaatacttgtgataaatacaggaaactgacgggcaatgtgtttgatcgcttcatctatattctgcctgtcacaacctaaatcggctttattgagcaccaatactggtttgatattttcttccattatctgggctatgaaacgttccgctctgcgaacattgaaattatcatcaaggctttgcacaataaatgctttatcgacgtaagaagcaatggcctgccggtcggctaccgttccgttcttcttgcgatacaacgcccgttcacgaggcaacgtatcaactataatccctttatttgcatcaaatggctgaaaaatcacccaatcgcccgtacaagggtattcatcaggcattctgccataaatcatatttcctgttaactcacacaaatatacgccatcctctgcaactacttcataacaggttttatgtgtcacgatgattcgtccatgagacatatctttaaattgtgagatttgtttttgccggaatagattatcactccaaccatataatgacagattattattttcgttactcattatcttaatgtatatagcatacacgtgaaagcacaacaatgcttttgctattgtatgcgggtataaaaactaaagttatataatataggagaatcacttccggaaagattatccgaaagtatgaaagttcgaatctgttaaagtgaacagattcttatcagaccaaatccgatgtaataaatgatgagttaaacatccactagttttaatgaaacattataattttaatgcgtcaaagatatgggaaataaataacagaaccaaatgaatgatgaaatatgtgtcaaaagccaatggatacacggcctgacgtttccattttccattcccttgaattcttgtcatactggtattccgcaccgacacttacttccgtattcgttttcacatcgaccgagatagaagctcctacccctgtatgtggaaataacggattgtaaaccggagggggtgtatttccccccataaaatattgtccccagacatttaaccggacatttctggctaaagaataatgaattctcgtatatattcctgctatgtcttgtctcgctataggcaaagccaaatagaattgccggcttaaggttcctcccgcttcaacgaaaaatctttgagaaggaatccagcgcattccggcatttaccgctacatattgccccaatcccagataagtcttttgttctgcactcccaataaaagaaaactgtccattcatagaatgctgacgaaaattataaaaatccgtcaatgccggattactttccagcaatgcaggaaaatcgtaaaaatagggagataagcccgatgcaggacttgaaggtgtcagaccgtatgtctgcatggacttatcatctgttgcaagttttttagcctctatatccggtaacttcggttctatgatttttgcttcgggcaactggtgtccgcttacttccgcagagctatttttcttttgcacatccattttattccccttttctatagtttgagaaaaggcagtagcaacacaagctaaagacacaaaaacaaagacagcaactgttctaatcataatattctcctttcttttatcaggggctatattatcaatacaattatccggttaaaagctcaatgatcggtaacatattttttattttaaagcagagatagattgatagacagcttttgccattacctgcgctcccttttcgttcggatgaatacggtccggaaagagttcgggcattccgtccatcgcagtatggaggtctataacagacaggtcgtttttcttggcgagcttcttgatcatcggaatgatttctttagagataatatcatcgttgatgccgtcacctgtaagataagctttggaaggatagcagagataaatcttcggctgtgaaggaaggcccttgaaagcgttgatcatgttctgcgcatctttcatgaagtctgctttgtatttccagttgaatgatttgctgtcgtttgttccgagtttgataacgacgatgttaggattaaaagctaacgcattcttataagcaggttcgttcatataaggatgatctcctttgttcaacatggtacgggcgctcactccgaaatttttcacccagtaattgtcgcccaacatacgggccagtacggaaggatagctgtcacggctgcgattctttattcctgctccgaacgtaatactgttgccgatgcaagccacacggacggcatctttgcgaggagccttgaaactacgcaaccaagaagtcagttcgttctgcatttcactcttgtagaggaaatcttcacggattccccaaccgtgtccgcctgtaggataaatatggagaacggaaggaacacctttcttatttaaagccagataatagttgactccgttggcaggaggaactaccttgtcatcatcgctataaacaatgaaagcacggggagtctctttggtcacttgcttctcgttggagaattctttttccaaatcggcagaagcgtccttacccaacagattgtcatgagagcccatgtgggtgaaagatttgtccatcgtgatcaccggataaaagagaatctggaagttgggacgaagtgcttcaggcgcatgtgtagcgatggtcgaagccagatggcctccggcagaagatcccatgataccaatatcattcggattcagattccatacgtcagcgctgtcacgtaccattttcatggctgcttcggcatcggagatcgggagggtgcggtcgcctttcggcatccggtatttgagaacaatcaatgcaattccttgtttgttgaaatacggcgcccaatcatacccttcgtgattgaccgccagaccggagtatcctccacccggacaggctaccacagcacgacctgtcgccagttccggtgccggcaggaaaacacgaagagaaggctgttcaatatcaaatggttttggcgtactttgtgccgagacttgcagacctgtcaatagcaggaccagcaatacaaaaagagaagagaatttctgtttcatagtatctgtatactttgattaatgaatatttgatgtgcgaagatagtaattttatgtatctttgcgcctccttttaaatagaaaaaatgatatgcaaggaattaagaatctgacacacggccctatcaaccgccaacttttcaatctggcgatgcctatcatggcaacgtcgtttatacagatggcatacagccttacagacatggcatgggtaggacgattgggcagtgaggctgtagccgccatcggttcggtaggaatcctgacgtggatgtccggttctatctccttattaaataaggtagggtccgaagtcagcgtaggccaatccatcggtgcgcagaatcaggaagatgcccgccagttcgcttcacacaatatcacgattgctctgatcatttcgatctgctggggcggactgcttttcatgttcgcaagccccatcatccgcatctatgaactagaagagcacatcacagccaatgccatcgaatacctgcggattatttccaccgcattgccgttcatattcctgtctgctgccttcacaggtatctataatgcagcgggacgaagcaaaattccattttacatcagtgggacgggactgattatgaatatcattctcgaccctctgtttatcttcggcttcggactgggaacaaacggtgccgcctacgctacatggctctcgcaggcaacggttttcgccatcttcatctatcagctgcgtttccgcaaagacgccctgctcggcggtttccccttcttctcccgactgaagaagaagtacacgcggcgtattctgaaactaggcctgcccgtagctaccctaaacacactgttcgccttcgtcaatatgttcctctgccgtaccgcatccgaacagggcggacacatcgggctgatgactttcaccaccggcggacagatagaagccatcacctggaatacctcccaaggtttctccaccgcactcagcgcctttattgcccagaacttcgccgccggacgaatagaacgggtactgaaagcctggcacaccaccctatggatgacgggaatcttcggaacgttctgcacgctgctgtttgtcttttacggcaatgaggtcttttcgatctttgtccccgaacaggcggcttacgaagccggaggtgtatttctgcgtatcgacggatattcgcagctgtttatgatgctcgaaatcacaatgcagggagtgttctacggcatcgggcgtaccgtgcctcctgccattgtcagcattgtatgcaactatatgcgtattccgcttgccatcctgtttgtacggatgggcatgggagtagaaggtatctggtgggcagtatgcgtcacaacgattgccaaaggactgattctcttgggatggttcaccatgatcaggaaaaaatgcttaaatctgccttccgtgtcaacaaggtagtcgtgtcgtttgttattttacatatacaaagatcgtccggagttattttaacttaaaaagtatgaccttggcaaataatatgtatctttgcgttgttaatttattaaagtattattttataaacctatttaaaaaacattgcattatgaacaagatgaaatggatggttctcttcatgagtataaccatgatattcagtggctgcgcaagcatgaacaatacgggcaaaggtgccgcaatcggcggtggttcgggtgctgcattgggtgctatcctcggcggtgttatcggtaaaggcaagggtgctgccatcggtgcggctatcggtactgcagtaggtgcaggaacaggtgcccttatcggaaagaagatggataaagcggcagcagaagcaaaacaaattgaaggcgcacaagtagagcagataactgacaacaacggattgcaggcagtaaaagttacattcgattcaggtattcttttcactaccggtaatgcaactctgagtgctgctgccaagtctgcattgagcaagttcgccaacaacgtactcaaccagaacagagacatggacgtatccatctacggatataccgacaatcagggctggagaaacagtactgccgaacaaagccgtcagaaaaatctgaacttgtcacaggaacgtgcacagagtgtagccagctacctgttaaactgcggcgtttcttccaaccagattaaaggtgtgcagggaatgggcgaaagcgatcctatcgccagcaacgacacagctgccggaagagaacagaatcgtcgtgtagaagtttacatgtacgcaagtgagcagatgattaaagatgcacaggccgcttccaattaaaaaaatattgcgttatgcgcgcaacctgctgattttcttctttgcatctaccattctggctgtgatcgtctaccgctttatgccggtgtatgtcactccgctgatggtcatccgaagtgtacagcagcttgcgtcaggagataaacccacgtggaaacacacgtgggtttcttttgataaaatatctcctcacctgccgatggcggtcatcgcctccgaagacaaccgctttgccgaacacaacggattcgacttcatcgagatagagaaagcgatgaaggagaacgaaaaacggaaacggaagcgcggagcaagtaccatcagtcagcagacagccaagaatgtgttcctatggccgcaatcatcttggatacgcaaaggtttcgaagtttatttcacctttctgatagagttgttctggtcgaaagaacggattatggaggtatatctcaactccatcgaaatgggaaaagggatttatggcgcacaggctgccgcaaagtataaattcaacacaacagctgccaagttgagctcaggacagtgcgcactgattgccgctacgctccctaacccgatacggtttaactctgcaaagccttcggcttacctattgaaacgacaaaaacagatattgcgattaatgaatctggttcctaagtttccgcctgtagaaaaaaaggcggtcgataagaaagacaccaggaagaagaaaaagaaataaagcaatccctttatcacagtctatttcatcaagaaacaagacaaggataaagggattacttttttctgttattatttgagatacagactatgccggttcctcacacctctcgatatacgccaatggttcgcctttatctaccaatgctccctgcttggcacatacctcgatcacacgaccgctaaaattcgccaacaccttatcatatgtatgccaaggagtagcaatatagcaaaacacatcgtccggaccatatttatgtcccacttcgggcggcatagaaggcgattccacatcgatctcccaaatgatctgccctttctccattgccgtcaccggttcggctttggcacgtttcatccgtttcacttcttcttcggagaatccctgttttgccaatgcggcatctttggcacgctgcaaatcatcttcgaaacgtttcttggcaatacccgatttataatcccgatattggcggtcgtgcattgccagttcgaaaagttcttcatcatcctgtccgaaatcccagctgttttctgtcatttccttacgatactcgtccagttgatccggatagttcttctgcgggtcttcgtccgtaaattcgtatcctttttcttttgccaatgcgataatctccggagcaagtgcaccgggcaaacgaccactcttacctagaatcatatcccaggtatggttgtcgatcatcgtccaacgctcctctcccttgatcagagacatcacattcatcaatgccacgttcttcacatattggctgaacggagtcactaatggaggatagccgagtttcggccacacatattccacttcgtcaaacagcatcacgagcaaatcgtcgatgctcagttccggttcgttcttacctctcaatatcagattgatgccggaatgcactcctttcagatcggccatcatagaacccatcatacctccgggaagtccgcatttcaagagcaaagaagacatatgcttgttggtagggtccataaaataacccagaaaatcgtcaatgaactcctgtgtcatggcacgggctttcatgtaggctttcatattaatctccggtacctgaaatcccgcgtctttcagcatagcctgcacagagataacgtccggatgaactttcccccacgaaatcggctccattgcaacatcaataatatccgcgccattctcacaaacttcgaggatagaagccatcgaaagtcccggtccgctatgtccgtgatactggatgatgatttcgggatgccgttccttgattgctttcgtcagacgtcccagcatttcggggcgaccgacacctgccatatctttcagacagatttccggtgctccggcctctatcagacgctcggcgatagcggtataatattctacggtatgtacgggcgagaacgtaatacataacgttgcctgcggaatcatccccgcttcaagggcataatgaatggaaggaataatatttctgacttcattcaagccgcaaaagatacgggtgatgtccactccctgcgcatgttttactttatacattaaccggcgcacatctgccggaacgggatacattcgaagaccattcagaccacggtcgagcatatgagtttgtatgccggcttcgtggaaaggtttcgtgaaagcccggacggctttgttcgggttctcgccatacagtaggttgacttgttcgaacgcgcctccgttggtttctacacgggagaaacaacccatttcgataattaacggagcaattcttactaactgatcggcacgcggttgatacttgccggacgactgccacatatcccgataaacgagactgaatttgatttcctttttcattgccgtaaatagatgagatttatattacttaggttaactagttgatacaaatatactgagttctctgacataataacaaatacagagagaataagttggggtataaagacatgtttaatatcatattgtcacaaaatcaaaggagcaagcgagtttttacccgttgctccttaccagaattaattgtttgactaatgtgctatccctatttatacaaaatctttcaactcttgttgcaaacgttggcgtgtgaagaatatgcggctcttcaccgttccgaggggtaggtccagcttctcagcgatctcacggtatttaaaaccggatacgtgcattgaaaatggtactttatattccttcggcagcgcgttgacgatgcggtgcatctcttttaagtcataagcgccttccgtactttcaaatcctgagtcttgggggagattcaaatgatacagattgtcggtctgatctacgaatgtctggtcacgtacgattttacggtagttattaataaagatgttacgcatgattgtgtacatccatcctttaaaatttgtatcgggaacatatttttcctcgttatccaaggcctttaatgatgtttcttgcaataaatcatttgcttcttcacgattggcagttaatttataagcaaaacgaagcaactcttcctgaactccaattaaatcttttctgaaacttaaacttttcatactttaagggttttacggttaatatttcgtttctttcttgacgtttgcaagtttaaaggtattttatgagtcaaacagggggaaattcgtcatttcttagggggtgaaactgtcaaatgatagattttaggtgctttttgatagtttttaggtggtttaggacgttttttattctcttcttcttgtttggcaatacaaaataacttacttttgggtagtattattaacttaaagtaaaggacatgactatacttattatcgtaggaataatcgtactgttgggaatcatttttgcttccatgtacaactcattggtgagactgagaaataaccgtgaaaatgcttttgcagacatcgacgtgcagctgaaacagcgccacgaccttattccgcaactggtggataccgtgaaaggatatgccgcacacgaaaaagataccctcgaacgggtgattcaagcacgtaacggtgcagtcagcgccaagacaatcgacgagaagatagcagctgagaatcaattatcttccgctttatcgggattgaaaatcacgttggaggcttatccggacctgaaagcaaaccagaatttcctgcaactgcaagaagaagtatccgatgtagagaataaattggctgctgtacgccgttactttaactcggctacgaaggaatataataatgcggttcagacattcccgtccaatatcatagcaggtatggcaggtttccgcagagaaatcatgttcgacctgggtaccaacgaacgtgcgaatctggaacaggcaccgaagatcagtttctaaaaacgagcacgtatgcagtacgtcggaatccaaacacagcagagccggaacaaccggcgctctgttcttctgttatttctatttccctgcctggtagcagcattgctttatctggcctgctatctgctggccgctatggggcacggtgaaagcatggaagtaagtatcctggaattggctaatcctcttttcatcaatgccctcccctatacgatgggggtcgtattgatttggttcctgatagctttctgggcgaatacgagtatcatcaaagccgccacaggcgccaaacctctcgaccgcagagagaacaaacgtgtctacaatctggtcgagaacctctgcatggcaaacggaatgaagactccgaaaatcaatatcatcgacgacgattcattgaacgcttttgccagcggtatcaacgaccgcacctatacggtcactctctcgaaagggattattcaaaagttgaacgacgaagaactggaagcagtcatcgcccacgaactgactcacatccgcaacagagatgtgcgcctgctgatcgtctcgattgtatttgtcggaatcttctcgatgctgacgcagatcactttctatactattacgcacgcgcgcatacgtagcaacgggaaaaacggcggaggagctatcctcatcatactgattgccttagtaatagccgctgtcggttacttctttgccagtctgatgcgcttcgccatttcacggaagcgcgaatatatggcagatgccggttcggcggagatgacaaagaatccgttggcattggcaagtgccctgcgcaaaatttccgatgatccggatatagaagcggtaaaacgtggggatgtggcgcaattattcattcagaatccgggcgaccagtcgaaaagtgccctcagtggacttagcggcctctttgccacgcatccccctatcgagaaacgaatctccattctggaacagttctaaggatttctgtttaattttcattaaagaaagcagggggactccttatttttagtatatttgagtgttatacatatatacactaaactgtaactgatatgaaaacaagaaaacaaatccttatgctactgctggttatgctagcaggaatcccgactctttcggcacagaccaagaaggagaagaaggaacagaagaaagaagctgtcagacagctgatcgtatcagaagactacaagatagacgtcaacactgctatgcccatgcgcggacgttctatacctctgacttcacaatactcactgcaaatcagaaatgattcggtattctcttacctcccttattacggacgtgcttacagcgttccttacggcggaggaagcgggctgatattcaacgctcccctcaaagaatacacgatggatatggataagaagggaaacgccgttatcaaattctccgcccgaagtccggaagacttctttgagtttagggcgaaagtgttccccgacggcaccaccagcatcgatgtcacgatgcagaaccgtcaggcaatcagctaccggggagaagtggatctggacaagaagtaaaatcttcaagaattgccgtcagtctcttcactaccttttaatataggaaggcaaatgtggtatttcacggcaaggatgcgtgtaacaaataccaccgatccgccaacgagctgacagacataagattccatccctgcggcatcgcacagccagtaagcgatgccgcctactacacacgccatcgcatagatttcttttcggaaaatcaaggggatctcattgataaagacatcacgaatcacacctcctgcggcacctgtgatactacccatgatgatggctacccaaaaaggataacccaaagcgatacttttccccacaccgaccaccgtaaacaaagccagtccgatggtatcgaatataaaaaaggtattattcagacggatcagccagcgaccgaaacagatcacccagatcaaggcaagtcccgtacagatcaaatagatagggttcgtcatccatccgggcgtcacatccagcagtacatcacggatagtaccgccaccgatagcggtagcaagacctacgacataggctccgaaccagtcgaaacgctttgctgaagccagccggataccactaatagcaaaggcaaatgtgcctataaaatcaagaatttgaacgaatgtcggcatatatttgttattttgtatgcaaagtaacgaataaattccgtaagaaaatgtacttttgctacacgaattagatagaaacaatatgaaaataacaattgttgccggggcacgccccaatttcatgaaaatagcccctatcacacgcgccatcgaagccgcaagagggctgggtaaaagcatctcctaccgtttggtgtacacaggcagacgggacgatacaagtctggatgcttccctgttttcggatctcgacatgaaagctcccgatgtctaccttggagtggaaagcagtaaccccaccagtctggcagccggaatcatgatcgccttcgaacaggagctgacggagaatccggcacacgtcgtcctggtagtggatgatctgacagcaaccatgagttgcgccatcgtagccaagaaacaaggaatcaaggtagcccatctggtagccggcacacgttccttcgacatgaagatgccgaaggaagtaaaccggatgattaccgacggagtatccgattatctgtttaccgccggcatggtggccaaccgaaatctgaatcagacaggcacggaaagcgaaaacgtatattacgtcggcaacattttggtagataccgttcgtttcaaccggaaccggctgctcaaaccggtatggttctccgtgctgggacttcaggagggcaattatctcctgctcaccctcaaccgacgtgtactgctcaacaacaaagagaacctgcggaagttgatgcaaacgatgatcgaaaaagctgctggtatgcctatcgtagcgcccatgcacacatatgtgcgcaatgcaatcaaagacctcggcatagaagccccgaatcttcatatcatgcctccgcagaattatcttttcttcggatatctgatcaataaagccaaaggaatcatcacggactccggcaatgtagccgaagaagctacgttcctcggcatcccctgtatcacgctcaacacgtatgccgaacatccggaaacgtggcgcgtgggaacgaatgaactggtcggcgaagatccggcagcactcgctcaggctatggatacgctgatgaaaggtgaatggaagaaaggcgaactccccgaacgctgggacggacgaacagccgaacgaatcgtacaaatattaacaagtaaataaccggagtggttgagccggactcgatgatcaacgagccggcttaatagccagacagaagtagccgaccactatcaggttcgacaagtgtttcagaaagtttcacgccgaggaaaccaaagtttcaaggcgtagaaaccagagtttcaagcagtgggaactagagtttcaaggcatgaaactttttgtttcaaccgttgaaacagattttggaactacggaaaagaatcggagcatgccggttcgcaagatgtggcatacgttgaaaagggaagtataaaaagataaaaaacaatctgcctccttccattgttgaatgatataagcttgtaaataacaaaaaacgatgggtaaaaaaagttatatactctattttactcagacttatttgttaactttgcagccctactacgaacgttatgatacaacgatataacaaaatactgatactgctcttagtcgtatttgcagtttcaaatgcttttgcgcagcaaataaagggggttgtaactgattcagtcactcatgaaccactaatgtatatctctgtctactaccaagacaagagagatatgggtactgtcaccaatattgacggagaatataagctcgacgcacggagaaacggaggaacgctcgttttctcttctatcggatatgtcaccaaaaccgttaaagtaggctccggaaatcagaccgtcaatgttaaactctctccggacgatgtaatgctcaccgaagtagtcgtaaaaccacagaaagaaaaatactcccgcaagaataatccggcagtcgaattcatgaagaaagtgatcgaacacaaaaaagcacaagtgctcgaagtgaacgattactaccagtacgacaagtacgagaaaatgaaaatgtcgatcaacgacctgactccggagaaactggaaaagggtatctacaagaaatactcattcctcaaagaccaggtggaagtgtcggagacgaccaacaaactgattctccctatctccgtacaggaaacggcctcacagaccattttccggaaagaccccgaaagcaaaaagaccattatcaaaggaaagaactcaaacggtatcgaagagtttttctccacaggcgacatgctggggactgttctgaaggatgtttttgccgatatcaacatctatgatgatgacatccggctactccaacagcgattcgtaagccctatcggcaacaatgccatctcgttctataaatactacctgatggatacgctgatggtggacaagcgcgaatgcgtacatctgacattcgtaccgcaaaactcacaggatttcggatttacagggcatctttatgtgctgaaagattcgacctatgccgttcagaagtgtacgatgaacctgcctaaaaagagtggcgtcaactttgtcaaccgcatggacatcgtgcagcagtacgagcagcttcccaacgggaactgggtattggcggatgacgacatgacggtagacctttcatggagttccaacaaaacctcgggagggctacaggtggaacgaacgactaaatacagcaattataagtttgatccgatagaacagcggttgttccgtttgaaaggtcctgtgatcaaggaggccgacatgctttcgaagagtgacgaatactgggcgagtgtacgccaagtgccgttgaccagaaaggaaagcaatatggatgtattcgtcaaccgtctggaacagattccgggattcaaatatatcatcttcggtgcgaaagcattgatcgagaactttgtggaaacaggcagcaaagagcataagagcaaagtggatatcggtcctatcaacaccatgatttcaagcaactacatcgacggaacccgtttccgcctgagtggtatgactactgcccattttgacaagcattggttcctgagcggatacggagcttatggtctgaaagacgaaaagtggaaatatagcggaacgctgacttattctttcaacaaacgagattatgtagtatgggagtttcccaaacattttatatctgcaacgtacagttatgatgtaatgtcgccgatggacaagttcctgtttacggacaaagacaacatcttcctttcgatgaaaacgacaacggtagaccagatgtcatatatgcgtgatgctaccatcaactacgaactcgaaacgctgacgggattcggagtgaaagccatgctccgccatcgaaatgacgagcctaccggaaaactggaatatctgcggaatgacgctgcacaaacccgtgtgcatgacatcacgacttccgaagcgagtgtgacactgcgttatgctccgggagaatctttcgtcaactccaagcaacgccgtgttccggtgtcgctggacgctcctatcttcacgctgactcatgccatgggcttcaaaggcgtgctgggcggagaatacaacttcaaccgcacggaagcaagcatctggaaacgtttctggcttcccgcttcgtggggaaagatagactgtagcgtaaaagcaggggcagaatggaatgtcgtacctttcccgctattgattctgccggaagccaacttgtcatatatcactcaacgtgagacattctccctgatcaacaatatggaattcctgaacgaccgctatgcgtccatgtccctctcttatgacatgaacggaaagttgttcaaccgcatcccgctgatcaagaatctgaaatggagagaaatgttccgtatccgcgcattgtgggggacattgaccgacaagaacaatccattcaagagcagcaaccccgacctcttccgtttcccgacacgcgacggcaagttcaccagtttcgtgatggacccgaaggtgccgtatatcgagggaagtataggtatctacaacattttcaagttgctgcacgttgaatatgtacatcgtttcacctaccgtgacaatccgggtatcaacaagaacggtattcgtttcatggtattaatggtattctaaaactatgcaacctttagcagaacggttacgaccaaagacattggatgattatatcggtcagaaacatttagttggaccgggggctatcctgcgcaaaatgattgatgcgggacgtatttcttcgtttatcctctggggacctcccggagtgggaaaaaccacattggcacagattatcgccaataaactggagactccgttttatacgctgagtgccgtgacttcgggcgtcaaggatgtgcgcgaagtgatagagcgtgccaagagcaaccgctttttctcgcaatccagtccgatcttgtttatcgatgaaatccatcgtttcagcaagtcgcaacaggattctttgttgggagctgtagaaaacggtacggtgacgctgataggcgcaacgaccgagaatccatcattcgaagtgatccgccctctcctctcccgttgccagctttatgtgctcaaatctttggaaaaggaagatttgctcgaacttctgcaacgtgccatcaccaccgacaccatactgaaagaacggaaaatcgaactcaaagaaacgacagccatgctgcgcttctccggcggagacgcccgtaaactgctcaatatacttgaacttgtagtggaatcggacacagaggaaacggttgtcatcaccgatgacatggtgaccgaacgtctgcaacagaatccgttggcttacgacaaggacggggaaatgcattatgacatcatttccgcttttatcaagtctatccgtggcagtgatccggacggggctatttactggctcgcccgcatggtagaaggtggtgaagaccctgctttcatcgcgcggagactcgttatctctgccgccgaagatataggtctggccaatccgaacgcattgctgctggcgaatgcctgctttgaaactctgatgaaaatcggttggcccgaagggcgcatccctttggcggaaacaactatctatctggcaacgagtcctaaaagcaattcggcatacagtgccattaacgatgcattagagctggtacgttccaccggaaacttgcctgtacctctgcatttacgcaatgctcccaccaagctgatgaagcaactgggatatggacaagaatacaagtacgcccacagctacgaaggcaacttcgtgaagcaacaattcttgccggacgagctgaaagaaaaacgaatatggcaacctcagaacaattccgccgaacagaagcatgcagaacggatgcagcagttatggggagaaaggtttaaataagtattaggtattaagtattaggtattagccgtagccgtgaaagaaaatttattaaaagagaagtctaccaaatttgcaattcgaataattaatctatataagtatttaagagattgcaagaaagaaacaattctatcaaaacagatattacgtagtggaacttctatcggtgctaatattagagaagctatttatgcagaatcacatcttgactttatacacaaatactctatttctcaaaaggaatgttctgaaacagaatattggctatatttacttcagcaaacagaatatataagcgatgaacaatatgaatctattaatactgactgtctggaaattcttaaattactgacagccacaattgtaaaactaaaaaataatgggaatgccccataatatttattacttattacttattacttattacttattatgaaaatagtagttttagacggctttgccgccaatcccggtgatttatcatgggaaggtttgaaagctctcggagaatgtaccatttatgaccgtactgtccccgaagaagtattggaacgcgcagccggagctgaagtgattctgacgaataaagtaatcatcaacgccgatcacatggctgccttgcccgaactgaagtatatcggtgtgcttgctacgggatacaacgtagtggatacggcagcagccaaagaacgtggtattattgtaactaatatccctgcatatagcacagcttccgttgcacaaatggtatttgcgcacattcttaatatctgccagcaagtacaacatcattcggaagaagtccacaaaggccgttggaccaataacaaggatttctgtttttgggatactccgttgatagaattgcgggataagaaaatcggtcttgtcggattgggaaatacaggatatactactgctcgcgttgccatcggtttcggtatgcaggtatatgctttaacttcaaagtctcacttccagttgccaccggaaatcaagaagatggatttggatcagttgttcagcgaatgtgatattatcagtctgcactgcccgctcactccggaaactcacgaattggtgaacgcacgccgtcttgctctgatgaagccgaatgctattttaattaatacaggtcgtggcccattggttaacgaacaagatcttgcagatgcactgaacagtggcaagatttatgctgccggagtagatgtactttcttcggaacctcctcgtgccgacaatccgttgctgactgcaaagaactgctacattactccgcatatcgcgtgggcaagcacagaagctcgtgagcgtctgatgaatattgccattagcaatctacaggcttatatctccggaacaccggaaaatgtagtgaataaataggattaccaagagagtagctaagcctaagagaatatgtcgaagccctcatagattaaagatcatcctcgctacaactatctgtggcgaggatgatttcgttaaaaggggagtttgacacatcctcttcctttaatgtctatcaaaattaccttaataggaatgtcctccttcatccatctccttctccgtaatcttatggcggtcgatactacgccatgcatagaatatataagctatcacaaacggaacaagaatagagacataagccatagtcttcagcgtaaattcactcgaacagctgttagccaatgtcagcgaactttgcaagtccgtatatgaaggataataagcagtgttattatatccggctacgagtaacaaagccaagactgtcagcactgtacctatccctgcaaaccagattcctttgtcgaaagtctttttcagaaccgtcttaccgattccaaaaagtaccaatactacacctatcaggaagatgatcagaactaccggcatttctataaagttgataaagtacttataaggctgcatataaacctccaatgtatccggattgacagcaaaaccgtcagaaaccaatgtacggattacaaatgccaaaaagaatacaaggaagaaaatagtattattcaatactgcacgacgacatttatcggtcagttccttatccgctatactattaatgaaatagagcgaacccaacacacgtgccaaaaagaatacagccagtccgagaataacattccagatattagtcaacgcgtccagtccgtgccatccatttccccaatgactgataaccggcataatcgtatccgtcatattcgccttattaatatagaaatcagaaccggtgaagaaagtggcgactgctccacccagcaacagaggtcctactaccccattaattaccaagaaagtctgataggtctttttacccagcaaattccctgccttgctctggaactcgtaactcacagcctgcaacacaaaactgaaaagaataatcatccaaagccagtaagccccaccgaaactggtactgtaaaacaacgggaacgaagcaaagaaagcacctccgaacgttaccagcgtagtaaacgtaaactcccacttacgtccggtagagttcaccatcatcttacgatgttcctccgtcttacccaaacagaacaataaagaatttcctccctgcacaaataataaaaatacaagtatggcccccagcaaggaaacgaccagccaccaatattgttgtagaaatatatacataatatgtaagtattaagttttaagtattaagtattagctcaagtaataagcaatgtatagtatcaagtaataagtaatagataataagtaacaacgtcaaccatgatgacaaatcagcctgcagctacgattaatacttattacttaatacctattacctattacttatctcttcttccggtcctttcttaatcgccttcaccataatccctatctccgcaatcagcattacggtaaacaagatcaggaagataaagaaagtagcctgaacggagcctacatccaatttagagatagccgccgatgtaggaagcatatcgcggatagcccaaggctgacgaccgcattcggcaaccacccatcctgcctgtccggcaatgtaagccaaaggaatggtcagcagagcgatccaatgcatccagcgcatcttactcaaatctttcttatatataaagaagagcacaacgatgaagaaaaggataaaatatccgcccaggataaccattatacggaaagcgtagaagttcagaggaacattcggaaccagctgattcacatctttaatatatccgtatccgaagtatggcatattctcctgcaaaacctgataggcaacagcggcatcttcctcgtgcccggcgctcttcgctgcacgataagcagccagcgctccgatagcggtcttaccccgctctatcttttcggctgccgacaaagcagtcgtaccgtctttcagctgatagccgccttcgataatattggtaattccggggacatacccgtccacatcccgctcggcaaggaacgaaagcatactgggtatctcaatccggaacaggaaagggtctttcccatcattgtaagtcttcttttcggggttcagcattcctattcccaccagacctacattggttcctccttcataaagtccctctacagccgccagtttcatcggttgggtctgtgcaatctgatagccggaaccatcgcccgtccatacagccagcagtgaagagacaagcccgaagatagcaccgatctttatgcttgcaagcgcaaactcgcgattacgtttcttcagcagaaaccaacaactgattcctacaacgaacacgccaccaagtacccatccggacaataccgtatgaaagaacttgttgaccgctacaggcgaagttgccaccgcccagaaatcaaccatctcattacgcactgtatcgggattgaactccatacctaccggatgctgcatccatgcgtttgctacgagaatccaccaagcggagatcgtagcccccagaccagtcagccaggtagaagcaaggtggaagcgtttgctcaccttatcccatccgaagaacatgacagcgataaacgtggcttccataaagaacgccagaataccttcaatagcaagcggtgcaccgaaaatatcacctacaaaccaagaataattactccagttcgtaccaaactcaaactccaggatcaatcctgtcgctacaccaatggcgaagttgataccgaaaagtttcatccagaacttggctgtccgcttccaaaattcattgcctgttttataatacaacgtctccattattcccatcaccacagccagtccgagggtgagcggaacgaaaatccagtggtacatggctgtcatcgcaaattgggctctcgaccaatcgatcagcgaggtgtcaatactttcaatcataatcttatgtagtttaagagttaaaaatcagtggttttctccggaagtgcacgctgtatcagctcatttcccacatacgtacccttgtcggcatctgtaggatgatcgccgagaaagtcgggaaagaagaaaattttgaggatgaagaacataatgaataatttcactaagataataagccacaaagtacgacctaacgtcatactacggaaaccctccaaataaaagttccatattgcaagcagtgtattcttcataagctgaccttagaatttgtaatgagtacaaatatacaatttttataattaaaacaaacaagtatggcaaaatgttgcatgatttgtatggtttttctcaaaaaacctgcctatcgacagaaaaaaaacatttaacggcgaaaaagcgccatctgtctatcgcttttgcagctaatataatatgtacgtaccttcgttccagtaaatcaatagacatataaaaatatgataaatgtaagaagattgacagtgatagtatttcttggagcgggtctgctgcccggtatatccgcccaggaatcttctgtgcagacagccgcccagagcgagatgaatctccccgcccaatgggatttacagtcgtgcatcgactatgcgttgcaacagaacattacgattcgcaaaaaccgggtgaatgcggaaagtacacagatcgatgtgaagacagccaaagctaccctgttccccagtctgtcgttctctacgagccagaacatggtgaaccgtccatatcaggaatcaagcagaacgatcagcggaagcgaggtgatcgagacaaccagcaagaccagttacaatggcaattacggtctgaatgcttcgtggaccatttataatggtagcaagcgactgaacaccatcaaacaggagaagctgaacaatcaggcagccaatctggatgtagaaacgtccgagaatagtattcaggaatctattgctcagatttacattcagattctttatgcagcggagtccgtcaaggtcaatgaaaatacgctgcaagtttccattgcacagcgcgaccgcggacaggaacttctgaatgccggaagcatagccaaaagtgatctggcacagctggaagctcaggtcagcaccgaccgttatcaattagtaacagcgcaagccactctgcaggactacaaattacaactgaaacaactgctcgaattggatggggagaatgaaatgaacgtctatctccccgccctgtccgacgaaaacgtacttttaccattgcccaccaagaaggatgtgtatatgagcgcgcttaccctccgtccggagatcgaggcgagcaaactgagcgtagaggcttcggaactgggtatcgatatcgccaaagcgggatatctccccaccatcagtctgagtgcaggtatcggaacgaaccacaccagcggcagtgacttcaccttcggagaacaggtaaagaacggatggaacaactccatcggtgtttccgtcagcgttcctatcttcaataaccgtcagaccaagagtgccgtgcagaaagcgaagttacagcgcgaaacaagtctgctgtcgctgcttgacgaacagaaaacactgtataagaccatcgaaggactctggctggatgcaaacagtgcgcagcaacgttatgcggcagcgaacgaaaagctgaaaagtacacagatcagctacgacctgatcagcgaacagttcaatctgggcatgaagaatacagtagagttgctgacagaaaagaacaacttgctgcaagcacagcaagagcagcttcaagccaaatacatggcgatactgaacactcagttgctgaagttctaccaaggagacaaactggcattataagccttcttccttactaaaagcggaatataaataagtaaaacagaatatagaatgaaaacgaaaaagattatcctgatcgctgtggcagttgccgtagtagtgggcggaggaatctggttctttacaggttctccggcaaagcacaaggtgatgtatgccagtgcgactgtcagtaaaggcgatatctccaattcggtgactgccaccggaacaatcgaaccggtgatagaagtagaagtcggtacgcaggtatccggtatcatcgacaagatttatgtagattacaactcggtagtaaccaaaggacagctgattgccgagatggaccgtgtcactttacagagtgaactggcatcccagcaggcaacttacgatggtgccaaagccgaatttgaatatcagaagaagaactacgaacgtagcaagggattgcacgataagtcattgatcagcgataccgactacgagcaggctctctataattatcagaaggccaagagcgctttcgacagcagcaaggcatctctggcaaaggcagaacgtaacctgtcatatgctacgattacttctccgatagacggagttgtcatcagccgcgatgtagaagccggacagaccgtagcttccggattcgaaactcctaccctcttcaccattgcggccgacctgacacagatgcaggtagtagcagacgtggatgaagcagatataggcggtattgaagaaggacagcgcgccagctttactgtcgatgcttatccgaatgatgtgtttgacggagtcgtgacacagattcgtctgggagatgcaagcagtagcagcagcgccagttcaagtaccagcacggtagtcacttatgaagtagtgatctctgctccgaatccggacttgaagctgaaaccgcgtctgacagccaatgtgactatctttatccttgataagaaagatgtattgtctgtccccaacagagctttgcgtttcacccccgaagcaccgttgatcggtaagaatgatatcgtgaaagattgcgaaggcgaacataaggtatggacgcgcgaaggaaccacctttacggcccatccggtagaaatcggaatcagtaacggtatttccacagagatcatcagtggtgttgccgaaggaaccaaagtcgtcacggaagccactatcggtgctatgccggacgagaatatgaatagagaaccggggcagggaaacggagaaagaagcccgttcatgccaggccctccgggaaacaacaaaaagaaaagcaacaagtagccaagtatgaaaaaagtaattgaacttcaaaatatcaaacgagactttcaggtgggagaagaaaccgtccatgcgttacggggcgtttcgttcaccatcaacgaaggtgagtttgtgaccatcatgggtacttccggttcgggaaagtccacactgctcaacacgttgggctgtctggacactcctaccagcggggagtatctgctcgatgacatctccgtgcgcaccatgagcaagcctcagcgtgccgtactgagaaaccggaaaatcggcttcgtcttccaaagctacaacttgctgcccaagacgacggctgtggaaaacgtagagttaccgctgatgtacaactcatcagtgagcgcttccgaacgtcgccggcgtgccatcgaagcgttgcaggcggtaggtctgggcgaccggttggagcataagtccaaccagatgtccggaggacagatgcagcgcgtagccatcgcccgtgcactggtaaacaaccctgcggtcatccttgccgacgaagcaaccggaaacctcgacacacgtacgtcttttgatatacttgtcctgttccagaaacttcatgcggaaggacgtaccattatattcgtaacgcacaatcccgaaatcgcgcaatacagtagccggaacatccgcctgcgcgacggtcatgtcattgaagatacagtcaactctcatgtcctgtccgccgccgaagcactggccgcattgcccaaaagcgacgaggattgaagataagtaataggtaataagtattaggtattgggtattaagtatcaaatattaagtaataagtaacagtagtttatgaatggaactaacttatttaaaatagctctccgggcattggcgaacaacaagctgcgtgctttcctcaccatgcttggtatcatcatcggtgtcgcttccgtcatcacgatgctcgctatcggtcagggatcgaagcgaagcatccagcaacagatatcggagatgggatcgaacatgatcatgatccatccgggagccgacagacggggtggtgtccggcaagacccatcggctatgcagacgttgaagctgaccgactatgaggccttgcgcgatgagaccaatttcctgtccgccatcagtcctaatgtgtcttcgtcgggacagcttatcgcgggtaacaacaactacccgtcatccgtcagcggtgtcgggctggagtatctcgacatccgtcagctgagtgtagaaagtggagatatgtttacggaagccgatatacaaagttcggctaaggtctgcgtgatcggtaaaacgattgtagacaacctctttccggacggaagcgatccgatagggaaaatcatccgcttcaacaagataccgttccgggtggtcggtgtgctcaaagccaaagggtacaactctatgggacaggatcaggacaatatcgtactggctccttacaccaccgtcatgaaacgattgcttgccgtcacctatcttcagggtgtctttgcttctgccctatcggaagacatgaccgagtatgctaccgatgaaatcacggaaatcctgcggcgcaaccataaattgaaagcttcggacgaagacgatttcaccatccgtacccaacaggagttgagtacgatgctaaactctaccaccgatctgatgaccaccctgctcgcctgtattgccggaatatctctggtagtgggcggtatcggtatcatgaatatcatgtacgtatccgtcaccgaacgtacccgtgaaatcggtctgcgtatgtccgtcggcgcacgtggcgttgatattctgagccagttcctcatcgaggctatcatgatcagtattacgggaggtcttatcggagtcatcataggctgcggagccagctggatcgtgaagagcgtggcacactggcctatcttcatccaaccttggagtgtcttcctttctttcgcagtctgcaccgtcaccggagtcttcttcggatggtatcctgcaaagaaagcagcagatttagacccgatagaggcaatcagatacgaataaaaaactatctttgtctttatgaaacaaagcctaacatccgcacgtcgtcccctggaagcactgatacacattatcggctgggggattatgttcggttttccgttcttctttgtagagcgcgaaaacggaaacatcaactggatggcatacttacgccattctgccgtaccgttgtctttcatgatcgcgttctacgtcaactacttcctgctggttccccgacatctttttcagagccagaccaagagatatattacttacaatattctcctgttgtgtgtcatcggtctgatgctgcacctttggcggagtctgacattcgatccttcctttgttcccaagcctcaccggtcgggtggtcctccgggatggctgttctttgtcagagatatgctgagtctcgtcttcaccattggactgagtgccgccatacgtatgagtgcccgatggacacaagcggaagctgcccgtaaggaagcggaacggaaccgttcggaagcggaactgaagaatctgcgcaatcaactgaacccacattttctgctcaatacgctgaacaatatctatgccttaattgcttttgatacagacaaggcgcaacaagctgtgcaggaactaagcaagctcctacgctatgtgttgtatgataatcagcagacctacgtcccgctaggcaaagagactgactttatccgcaactatatcgaactgatgcgcatccgcctgtcctccaatgtacagatgactacgcagattgatatactgccggacagtcggactcttatcgcaccgcttatctttatctcgctaattgagaatgccttcaagcacggtatatcgcctacggaacggagttttatccatatccatcttgcggaaaatgagacggaagtgatctgcgagataagcaacagcaaccacccgaagaacataatggacaagagtggttcggggataggactggaacaggtgaaccgacgactggagattctttatccaggccagtatacctggcagaaaggaatttcggaagacggcaaagagtacagatccaggctgagcatccgtgtgagagagagtattaataagtaataagtattaagtaataggtaataattgagagtatattcggtttaggtaattaaataaaatatagagaattatgatattacgttgtgccattgtagatgatgagccattggctctgggcctactggaaagttatgtgaataagactccgtttctgcaacttacaggaaaatattccagtgcagttcaggcaatgaaggagttgccgggcgaagaagtcgatcttcttttccttgacattcagatgccggaacttaacggactggagttctcacaaatggtagattcccgtacgcgtatcgtttttaccaccgcattcggtcaatacgctatcgacggttatcgtgtcaatgcactcgattatctgctgaaaccgatctcgtatgtcgatttcctgcaagcagccaataaagccctgcaatggttcgagctggtgcagaagccggaagagatagacagcatctttgtaaaaagcgactataagctggtacaggtagaactgaaaaagatcatgtacatcgaaggactgaaagattacatcaaaatatatacggaagatgatgccaaacccatcttgtcactcatgagcatgaaagccatggaagagcttttgccttccagccggttcatacgtgtacaccgttcattcatcgtccaaaaggacaaaatacgggtgatcgaccgtggacgtatcgtctttgacaaaacgtatatccccattagtgatagttacaagcaggtttttcaggcatttttggatgaaagaagctgatgattgtctaatttatcggcaaaaaagtgaattttgtcgattatagtttgtcagaaatcggttttatatgtaactttgcaacgaacagaaagggattgtgaaattccaagaatagaatagtttagttaagtctagtttagtttttgtgttgagtgcttcctcgtcggcggacgatctaggaagcactttttatttatctatttatagaacaagctggacaatagcactaaatcaaagaaaaataacataaagtttgattatacctaaagctcttttatattctattaaatcttaatgcatttctttttgcgagcaaagacttgactccgtttgtttatagggggatgctcaaacaagaacagctctccggacgttatactactgatatcaaccaaattataaacattaattgcagataatatgtgtttccacaactccatgtcagccaaagccatcaaagttgccgcccgttacggacgcaaatcggatgtagtcgagatataccaaagcattcttgacgaacagtatcatgtgaatgcgtttactttccccagatatcctatcattacttcttcggacgaagtacaggttttcaactggggactcatccctttctgggtaagaagcgaagaggatgcgacagaaataagaaagatgacacttaatgcccgtgcggataccattttcgagaaaccgtctttccgcgaaccgatcatgaagaaacggtgcatagtgcccagtaccggctactttgaatggagacatgaaggagcaaacaagataccttattatatatatgtgaaagatgaacctatcttctcgatggctggcatctacgaccgttggctggacaaggatacgggagaggaacacaaaactttctccatcatcaccactgacaccaattcgctgaccgattacatcgataacaccaaacaccggatgcccgccatactcacccaagaggaggaagagaaatggctcaatccctcattgagcaaggccgaaatagcttctttactgaaacccttcgatacagagaagatggatgcatacgttatcagaaacgatttcttaaagaaatctcccaatgatccgacaatagtacaaagggcataggaaaaagaagtttatcctaaaaaagtgagaggtgtgagggaggaattgcaacttttatatttttatttcactgtttctactctctaattttcaactaaaaaaaatacgaatgttagaaatcctctctcactcctctcactttttcccctttatttcatgaaattcggaagaaagtacaaaaagaaacagagttcaaagagtaaaacgtggtgggaaatccggaaaacataaccatcttttccgaacttcccaccacgttttatctagttcgcaccgtccggtgatttactcacccaactcgcccagcaaatcatacgacggcgcaaagaaaagcgtccccgttattgccgtactgaaatcgagcaagcggtcggtattgcccgccggactgccgataaacatattctccaacatccggcgagtcgtgctgaatgtactagcatacccaataaaatacgtaccatactcccccttcgaagtattggcaaacggcatattggcacgtacaatcttcagatcatcaccgatattggtcacagcattatgcgcattctccggcttctcttcgtccgacagctccacatcattgaacttatgacgtccaatcaccttttcctgctgttccaccggaagcgcattccacgcaaccatatcatgaatgtatttctgcacaaacacataactgcctcctgcaaaatccgcatcctcctcgcctatcaccgcaaaatgatagggattctcatcgacagcaggattctccgtaccgtccacaaagccgataatcgccttaccatccatataacggaacccatgcgtctcatcaacagacaccacagcccctttgagcttctcatcaaggatagaagcaaactcgaaacacagccccatctgcttcgcccgaatatggaacaacaaatcaccgggagtagaaacagctgtatacttctccccttttatctcggagaaagtactcaactctttcggtttacccttatcggggaaaagccgcgtccacgcatcagccccgaatcccatcgtgcaactgaattgcatatcaggaaaacgattgcgcatactacggatcattgccgagaaattggcacatacatcctttactttatcaaccgtatcgggggaatctgtcaggttatagactataaatattacattctctccctgttttccagccacatcctgtgggatatgaccgccgaacgaattttgaaatggattcatattcttttaattttagttttttagtttcgcccataagatatatccggtgataaaaccgaatcaaaaccgaatggctacataggcaagaagctcccggcttcgaccccgtgagcttctctcttctccaatgttactctctcttcttatatataatatactttgtctttatattgtctctctcttttcagtcattccgcacatacatcgcggctccggcatccataaagagttcgacattctccgcatgatgcgctatataagccgccggtcccgtatctcccgagtggcagatttcttccaccacttccgccttcgcttttccggtaatcagaaaaataacaaggcgggcagtcagaatcgggaatccggtcattgcaatgcgtttctgtccgttgcggggatgagtgctggtcacataaatctggtcggaagagagcaaagcctcctgtccggggaagatagaggaagtatgtccgtcatctcccgctcccaacagcacaatgtcaaattcgggccagccattcttcttgggcacctgccggctgacaagttcggaatagcgggctgcttcttttgccggtttctcttcaccacgaatgcggtatacattttcgtaaggaatgggcactatccccaaaagcagggaacgcatcattccataattactatcagaatcttcgggaggaacgcaacgttcgtctacccaataaagtttcatacgcttccaaggagtaatatcagcgtattcatttgcccataaatcaaacatcaaggcgggagtgctgccaccactcactgctatgttgaacgttttgtccggttcagcattcatgatatccaccaagtggaatatcaacgaacgggctgtctccatagacgacgggaaaacagatagtctcatagttcgcaatattggtctgtatttgttaaattcttacacggattggtccagtctgccccatgctcgtgcatcatagcttcactttcgagaggtccccacgtacctgccggatagccgtacaaaggtgcgtccggattatctttccaataacgtaagaccggatcaaagaagttccaggaagcctctacagcatcacttcgagtaaataaggtcggatctccctgaatgcagtcgtcaatcagacgggcataagcgtcaccactcggcacgccgcccaactgtgcgtaactgaaatccatcgtcacctgacggacttcgaaacctgcacccggaaccttcattccgatcttcagcacaataccctcgtttggttgcaaacgaaggatcaacttattagccctcggacagttaccgccggaacagcggaacatctgatggggcgtctcgcggaagtgaacgacaatttccgtcaccttcgtcggcatctgcttaccggtacggatgtagaacggtaccccgctccaacgccagttactgatgcccagcttcatcgcaatataagtctccgttcgcgagtcgggagccactcccttttcctcacgataccccttcttattgcccgaagccgtatattgtccgcgaacgatatgttcattcaagtccgtctccgtaagcggagtcagcgactcataaaccttcactacctcattccggaaattatccgcattgaataccgccggcggctccatagccgtaagggctacgagctgaatcaagtgattctgcaccatatcccgcaaagcccccgccgtctcgtaaaaacctccacgctgctcaatacccagattctctacagcagtaatctccacataatcaatataattacgattccataacggctcaaaaataccattggcgaaacggaaagcaagcacattctgcgccgtctccttgcctagaaaatgatcgatacgataaatctgatgctcatcaaacacagaagagtaaatcttattcaactcaagcgccgactccagatcatacccgaatggcttctcaacaataatacgagaatgaggagtattcagcccggccgccttcaaatgcaaaggcaccaccccatacagcgaaggcggagtagccagatagaacaacaaattatccggatcgacctccttcgtaagctctaccaaacgctcccgcaactgcgaatatccctccactttcgcaggatccatcggcaaataatacaaatgagacacaaaagaagacatcagctccaaattctgctcttcagcctttacaaactgctgcaactccccaagtatatatgaacggtaatcttcatcagaatagacagtacgcccaattcccagaacagtaaaactccccgtcagccgtttatcccgatacagagagtacaatgcaggcatcaacttgcgtttagtcaagtcgcccgaagcaccaaaaataatcattgcaaatttatccatcgtcgtatttttaactttttaccttttatccatccatcaccgcacctaaaccgaccagcctcaaccaaccgacaaaccgaccaatctcaaccaaccgccctaacgcataatcacccacacacccactactacccccacctacaacttaccatccgaacggtctcccggcctcaccgaaggagcgtcaagcggaggctgtatctccggcgtgaagaagggcaggctgtttgagcggagcgagttcctgccctttagccggagatgcagccggagtagctccgtaggtgcagccttgattttttcttttggtacctttcttttgcatcaaggcaaaagaaaagtactcagacattataagtccccgacttcgtctcccctccgtgtcccgtccaattctcatgaaagaactgtccgcgcagctcatccttcctctcaaacgtatgcgcaccgaaataatcacgttgcgcctgcaccagattggcaggtaaattgtcagaagtcagcgaataaaaataattcaaagccgaagagaaagccggaacaggcaattcctccttcatcgcctccgccaccagattcttccatccggggagcaaagacttgatttcctcacggaagtaaggagccagcaacaaatgcttcggcttatccgccgcctcaaaagcagcagctatatcattaaggaaaatactgcggatgatacatcccccacgccacatacgggcaatggaggccaaatccaaattccatccgaaagcatcagaagcccgctgcaacacagcaaagccctgcgcatacgacaccagcttggaagcgtaaagcgcagaaaatatctccttcaccaattccgccttattatatacaggtaatgtatgcttgcacaagaactgcttggaagccagatgacgcaactccttctgagccgagagactgcgttcgaacaccgccgtggcaatcaagcccaacggcatccccaactccatcgcattgatgacagaccactttcccgtccccttctgtccggcagcatcgagaatcttatcgatcagatacccaccggatttatccttgtgacgcaaaatattagaagtaatctcaatcagataactgcgcaacttcccttcattccaacgggcaaaaacgtccgccatctcctcgttcgtcagatcaatgagattcttcatcacccagtaagcctcggcaatcaactgcatatcaccgtattcgataccgttgtgaatcatcttcacaaaatgtcccgacccggcagggcctacccactggcaacagggagttccgtccggcgctttcgccgcgatgctctgcaagacaggcttcacttccggccacgctttctccgatcctccgggcatgatggaagcaccgttcaacgcaccttcctcaccgcccgacactccgcttcctacaaacaagaatcctttcgattcagctaattttacacggcgattggtatcttcgtaattagaattaccaccgtcaatcagaatatctccgggagaaagcaaagggaaaagctgatccatcagttcgtctaccggactgccggcacgtaccatcatcataatcttgcgaggggtggcgattgattccacaaaagcctttatatctgtaaaaccttcaatgtttttacctttagcacgaccattcataaagcggtctactactccttcttccactccggggacggtacgattataaacagagacgtgccagcccttgctttccatattcaaagcaaggttctcacccatcactgccagaccgatcaacccgatatctgttttattctgatttgccatatcttatatattttaaaatattgtttatgtaagaaacacttgaaaagcacatttgttcgctagttttggattaaaatactatttttgtggtcaacaaataactatcagaatgaagaaaatcaagatcggcctgctgccacgcatcattattgctatcatcttggggattgccattggcactatttttccggctccgctggtacgaatattcgttacgttcaatggaattttcagtgaatttcttaacttctccatcccgctcattatcgtcggactggtcaccgtagccattgccgacatcggcaaaggtgcaggaaagatgctgcttgtcaccgccctcatcgcttacggcgcgacgctcttctccggcttcctgtcctacttcaccggtgtcaccgtgttcccctcgctcatcgaagtgggcgtaccgctcgaagaagtcagcgaagcgcacggcattctcccctacttctccgtatccatccctccgctgatgaatgtcatgacggcattgatccttgccttcacactgggattgggactggcggcactgcacagcgatgctctgaagagtgtagcacgggattttcaggaaatcatcgtacgcatgatcagtgcggtcatcctgcctttactgccgctttacatcttcggcattttcctgaatatgactcattccggacaagtatatgccattctgatggtctttatcaaaatcatcggagttatctttctgttacatatcttcctgctcgtctttcagtattccattgcagcactctttgtccgtaagaatccgttccggttgctgggcaggatgatgccggcctatttcaccgcattgggcacgcaatcgtccgccgccaccattccggtgacgctggagcagacgaagaagaacggagtatccgccgacattgcaggattcgtgattccgctctgcgccaccattcacctgtccggcagcacgcttaaaatcgtggcctgcgcactggcactgatgatgatgcagggaatgccgttcgacttcccgctatttgccggattcatctttatgctgggcatcacgatggtagccgcaccgggcgttccgggaggagccatcatggcggcactcggtatcctgcaatcgatgctcggcttcgacgagtcggcacaggcgctgatgatcgcactctacatcgccatggacagtttcggaactgcctgcaacgtgacgggcgacggagccatcgcactgatcatagacaaagtgatgggaaaagggacgggaaaataaaacagacttggtttgcatatacagcataaaataacgaaatttgtcccccgtatcttcaaataaaaaataaaggaatatgaaaacagcccttatatcaggcatcaccggacaggatggttcttatcttgccgaatttctcttgcaaaaaggttacgaagtacacggtatcctccgtcgttcttcctcattcaataccggacgtatcgaacatttgtattttgacgaatgggtacgcgacatgaaacagaaacgtaccatcaacctgcactacggcgatatgacggactccagctcactgatccgcatcatacagcaggtgcaaccggatgaaatctacaatctggcagcgcagagtcatgtgaaggtatcgttcgacgtgcccgaatatactgccgaagcggacgctatcggcacactgcgtatgctcgaagccgtacgcatcctgggactggaaaagaaaacaaggatatatcaggcttccacctccgagcttttcggcaaggtgcaggaagttccacagaaggagacgactccgttctatccccgttctccctacggagtggcaaagcagtacggtttctggatcaccaagaactaccgcgaaagctatggcatgtttgccgttaacggcatcttgttcaatcacgaaagcgaacgtcgtggcgaaacattcgttacccgcaagatttctctcgctgccgcacgtatcgcgcaaggcgagcaggacaagctgtatttaggtaatctggatgcccgccgtgactggggatatgcgaaagattacgtggaatgtatgtggctgattcttcagcataacgttccggaagatttcgtaatcgccaccggagagatgcacaccgtacgcgaatttgccgcactagcattcaaggaggcaggcatcgaacttcgttgggaaggtgaaggcgtggacgaaaagggtatcgacgtggctaccggaaaagtattggtagaggttgatcccaaatatttccgtccggcagaagtggaacaactgttaggagaccctaccaaagcccggacattgctgggatggaacccaaggaagacatcgttcgaagaactggtaagcatcatggtgcgccatgacatggagaaagtaaaaagaatgatcgctaccaagcactaacagacctcaaaccgaacgcggattacgccgattaaacgatcttctttttttacagaagatgcgcataaccggagtaatccgtgttcatatatgatacttaatcatggaaaagaatgctaaaatctatgtagcagggcatcacggtttggtgggttctgctatctggaagaatttacaggataagggatataccaatctgatcgggcgtacgcatcaagaactggatttgctcgacggtgtagctgtccgccgttttttcgacgaagagcaaccggagtatgtgtttctggctgctgcattcgtaggcggcatcatggcaaacagtatttatcgtgccgacttcatttataagaacctgcaaatacagcagaacgtcatcggtgaaagtttccgtcataacgtccggaaactgctgtttctgggcagcacctgcatctatccgcgtgacaccgaacagccgatgaaagaagaagtcctgctgacttcaccactggaatacacaaatgagccatacgccatcgccaagatcaccggactgaaaatgtgcgagagcttcaacctgcaatacggcacgaattacatcgccgtgatgccgaccaacttatacggtccgaatgataattttgacttggaacgcagccatgtcctgcctgccatgatccgtaagattcatcttgcgcactgtctgaaggaaggagactgggaagctgtccgcaaagatatgaaccaacgtcctgtagaaggcgtcaatggcgacagccccaaggcggacattctgaatatcctccgcaaatacggtatcagcgaaacggaagtgactctgtggggcacgggaactcccctgcgcgagtttctctggagcgaagaaatggccgacgccagtgtattcgtaatggaacacgtggacttcaaagatacctacaaagaaggtgacaaggatatccgcaactgccatatcaacatcggaacgggaaaggaaatcaccatccgccaactcgccgaacaaattgtagaaacggtaggctatcaaggcaaactaaccttcgacagcagcaaaccggacggcactatgcgcaaactgaccgatccgtccaaactacactctttgggatggcatcacaaaatagaaatagaggaaggagtacggagaatgtacgaatggtacttgaaataaattcaaaaagaactatccgcattggggctgaattagaaagaaacagactgaaaacaaccggtttttcggattaatccatgttaatgactgcgacatgcattgtgaactgtcttaacaagcattgttaatgacattaccatgcattcttatcgaccctaacaagcattgataacttccctttcttatagagagaacagtaatgtcatttgtaaggaacaatcgtgccacaggccggaaacacttgtgccaaaggcgtggcacaagtgtttcccctatacttcccaacacttttcccatacttccacatcttagtcccttattaccccaagactccccatttccaaaaattcttcattcttaattcttcattcttaatttaattactatatttgcacaatttaataccaaatgtgcaaaaacaatgaaaaagagttttatagcttacattgaaaatagtatcaagaacaattgggacttagacgccctgacagattataagggagccacccttcagtataaagacgttgctcgaaaaatcgaaaaactccatatcatctttgaagaaagcggaatccgcaagggagacaaaatcgccgtttgcggccgaaacagttcccattggggagtcactttcctcgccacactgacgtatggagcagtcatcgtccccatccttcacgagttcaaggcggacaatgtgcacaacatcgtcaaccactccgaagccaaattactatttgtaggagacatggtgtgggaaaacctcaacgaatcggcaatgcccctgctggaaggtatcctgatgatgaacgacttcaccttactggtatcacgcagcgaacgactgacgcacgcacgtgaacatctgaacgaaatgttcggcaagaaatacccgaagaacttccgcaaagaacacatcgaataccataaggatgaacccgaagaactggcagtaatcaactacacgtccggcacaacgagctactcaaaaggagtcatgctcccctaccgtagcctctggtcgaacaccaagttcgcgtatgaagtgctcgaactgaaagccggagacaagatcgtctccatgcttcctatggcacatatgtacggactggccttcgagttcctctatgagttctccgtcggctgccacatctacttcctcacccgtatgccaagtccgaaaattatcttccaggcattcgaagaagtaaaaccgaatctcatcgttgccgttccgctcatcatcgaaaagattatcaagaagagcgtactaccgaaactggaaacgccgaccatgaaaatcttactcaaagtacccatcatcaacgacaagataaaagcaaccatacgcgaagaaatgatcaaagcgttcggtggaaatttcagagaaatcatcgtaggtggagcagccttcaatcaggaagtagaacaattccttaaaatgatagacttcccttatacggtaggatacggcatgacagaatgcggtccgatcatctgctacgaagactggacaagattcaagccgggttcgtgcggaaaagccgcgccgcgtatggacgtacgggtactgtcttccgatccggaaaatatcgttggcgaaatcgtctgcaaagggcctaacgtgatgctgggatattacaagaacaacgaagcgacagaagcagtgatcgacaaagacggctggctgcacacaggcgacctcgccttgatggacgccgaaggaaatatcaccatcaagggacgcagcaagaacctgttgctcagcgccagcggacagaacatctaccccgaagaaatcgaagataaactgaacaacctgccatacgtatcggaaagcatcatcgtacagcagaacgagaaactcgtcggactggtttatccggactttgacgaagcattcgcccacggcctgaagaatgaggatatcgaacgggtaatggaagaaaaccgcgtagcactgaacgccatgttaccggcatacagccaaatactaaaaatgaagatatatcccgaagaatttgaaaagaccccgaaaaagagcatcaaacgctatctgtatcaggaagcgaaaggataaaggaagtgaaggattaagggaatactctgtgaacctaaactgaaaaaaagagttataataaagatgaagataataaagacaatattcacggcagctgttctgatggctgccgtttgtttgccggcacagaacaagagtgcgggcatcaacctttccttctggaaagacatctgcacacagccgtatgacagcactcagacgacttatgtaaacctcggtctgctgtctacgctgaaccgtctcaacggcgttggcatcaacgcgctgggaagcgtcattcatggagatatgaacggagtacagatcacaggattagccaatcttgccggtggtacgatgcggggtgttcagatagcgggtgtcagcaatatcagcggaaacaacaccgtagggctttccgccgccggactggtgaatatcacaggcgacggctcaaagggggtcattatttcgggacttaccagcatcggtggagacaacaactcgggagtaatgataagcggtctgatgaatgtgacgggaaacatggcttcgggatttcagttttccggcgtgtcaaatatcacgggacagagtttcaacggtatgatgacttccggactcttgaatgtggtaggcgaaaacatgaacggtctgcagattgccggtatcgccaatatcaccgcaaaagacctgaatggcgcacagatcgggttatgcaactatgcgacgaaggctcatggctttcagatcggtctggtcaattactacagggaagatatgaaaggattacaactcggcctcgtgaacgcgaatcccgatacaagaatacaaatgatggtatatggcggtaacgtcacgcccgccaacataggagtgcgtttcaagaaccaactgttttatacgatcttgggagtaggtgcattcgatcagaatctgaacgataagttttctatcagcacgtcttaccgtgccggactggcagtgcctgtttacaaaggtttgtctattagcggtgacctcggattccagcatatagaaacgtgctccaacaagggtgaagtgattccccgacgcctttatggattgcaggcacgggcgaatctggaatatcagatcagcaagaaattcggcatctttgccaccggcggttacggactgacacggtattacaacaaatccggtaatttcgataaaggagcgatcatagaagcgggcattgtcctcttctaaggctgattaataagtaataggtaataagtattaagtaataagtattaggtattaaccgtagctatcatttagaggtatatctatctgtcattcaaagttttcatcactttatcaaagtgaaacaattcgataatgacgagcataagtatctgtcatcctgagcttgtcgaaggatctcctcttttgtagtcacaaagaagagattcttcctccttacagtcgtctgaatgacagacagatgcgtctctaaatggcagctacggttaatacctaatacttattacctaatacttatttatactttctctttaatcaacccgatgcgataagccacaagcaacttcttcaaatcctgaatctgcgtcacaagttccttccctttatcggtgtctttcaccatcatccgttgcgaattgaactccagtacaaagttggttgacttgatatccaatccttcttcaatagctttctgcctagactggaacggctcatgctgcaccaactgcatcccgtgagaatggtagacaagcgtatagcccgcaattcccgtctccggctgataggctttggagaatcctccgtcaataacgaacagtttgccatttgccttcatcggctgttcaccttgaattgtctttacaggcacatgaccattgatgatatgagaatgaggtcccaatgccccaaactcatctaatatctgatcgcagatatcttcacgattgcgaagcgtgtagtaatatcccttcttttccttttgtatctccttgtcttccagaaaatagcgttcgaaagtcgccatcttatccttatcaaacagaggagcttccggaccacaccacatataccagatatagtccatcgcaaattctttatcatcctctccttcttcatcaaagtatgcagtacgaatcagctgatcggccttatcgagcaacttgcgtccccaatactccttgccacgtatcttgacatgcttgaaactgccatcctcattcaaaggtaccgaagcatgataaagaagattggaattggaaaccaaatacattccgccatacgtaaacaggcaacgcatgtgcttcttcaacttctcgctattcataaacgaatagtgaatcttttccacaagttcccgttcttcgtcggtcagtcgataaggatcggcaggatctacggtcgggaagtttgtgtcacgcagggcatattctttgccttcgtacacaaagactccacgctcaaaatcgatcttctccaacagcttccggttactcatcccgaactccggacgacggtctattatttcagcttccagcttaaactggatgatcgtaatcgccttgtgcatctgggtgatcagacgcaaagtcttctcattgtaattggtgtcggcaaaattcatcttcggcataaagatggtacacggatcatcggcataagtatccatggcaaaagttgccagaggaagcagattgattccataaccgtcttcaagagtacccagattgccgtagcgcatggacatacggatcacgttggctatgcaactgtcattgccggaagcggctcccatccacaggatatcgtggttgccccattgaatgtcgaagttgtggtaattgcacaaagtatccatgatgatgtgcgctccgggaccacggtcgtatatatcacccacaatatgaagagaatcaatagtcagacgctgaatcagattacacatggctataataaagtcatccgcccgcttggtagagattatggtgctgatgatgacattgatatatgcgtgcttattcggctcgacagacgtttcgtgcagtaattcctgaatgatgtaagagaactctgcgggcaaggattttcgaactttggaacgggtatatttggaagatacattctgacaaaccttcaccaactggttcagagtgatcagataccagtcgtccagatccttctcgcgggcttttaccagctgaattttctcttccggataatagatcaacgtgcagagttctttcttctccgcttcgcgcagggtattgccgaaaatctcgttcactttgcgttttaccgcacccgaagcattctttaacacatgttggaaggcttcgtattcaccgtgtatgtctgtcaagaaatgctccgttcctttaggcagattcaggatagcctccagattaataatttccgtacttgcatcggcaatagtaggaaaactccgggaaagcaactgcaagtagcggagatcgccaactatgctttcaggagttatattactttgagcagtcattatatgtactattttactatttacaatatgctatttatcgacttatcgtttatcgctataaatataacgatttatcatctacttattacaaattccagcctttaatgttcatcgtcagcccaataaaaacatcaacagcacctgcgcaatgatcacacgcagaaacatacacaacggatatactgtagcataagcgacggaaggattgtcacccggtatcgtatcgttggcataattcagcgccatcggattcgccatactgccgcacaacataccggatacactgccgaagtctatcttcataatcttgaaagcgacaaagccgaccaggaccgtcgggataattgtcagaccggctcccaaagctatccaaagcaatccttccggacggaagacagtatcgaagaaatgagcaccggcatccagaccaagacaggctagatacatggaaagccccaacgcgcgcagcatcagattggcgctgcgggtagtgtaagtgatcatgtgtatccgtgggccgaaagttcccagcaggatacccacgataatcggtccgcctgccagccccagcttcacgggagtactgattcccggtatggagaacgggatcgctcccaatgccaatcccaatacgatgcctataaatatgacaacaagattaggttctttcagacttttcactgcatttcccaatactttttctacattctgaatggctgctgcttcacctactactgtcaggcggtcgcccagctggagaatcagttccggagtggcaagtagttgcacacccgaacggtacacacggctgatattgattccataatggtttcttagtctcaatgagccaagtttctttccattcagttcggggcgggttacgacgatacgctgcgagatcaattcgctgtcaattgcattccagtctatatcttccttgttccagtccgtattttcttcctgttcaccgaaaagtactgtcagagccaggacattcttttccgctgtgatcaccaacaggcggtcgccttccttcaataccttgtcggaggtaggaatactgacatgaccgtcacgccacaaacgggaaatcacaaatttcggataactcatctgagctatatccttgatacttttattaaaaatagcggggttatgtacttgaaacgctgcgataaaggttttgttggcatcatccttttctttaatctccaagtcttctttatgaaccaagaatttacgaatcagcagtacggcaagaatcacaccgatcactcccatcggataggctaccgcacaccccaaagccggagtactgctctctatgcccatctgtttaagtgtctgctgcgcagctcccaaggcaggagtattagtcgtggctccgcaaaggatacccaccatatcaggaagagacacacctgtcgcataactggcaacaacagtcagcaaagtacccaacagaactacggccaacgccaacatattcagcgtcacccctcctttccggaaagaactgaagaaaccgggccctacctgaagccccagtgaatatacgaaaataaccagtccgaaactttctgcataattcagcatctgtggatcaaccgaaagcccgaagtgtccggcaaggatacctgcaaaaaaaacaaaagtgactcccagagatactccccagaaatgcactcttcccagccccagcccaatcgcagaaatcagtgaaagcaccacaactgcctgtaaggcagaatgttcgagaaacagattatataaccactccatgaattaaacatactaatagggcgcaaagataaaaactatttagtcccattcaaaacttttaagctttcatttcgcgccctatctcttctctaaattcttaatatcctgaaatcttatatgttatcctttaaattatctgtttgttatccgcaatctttttacctgtcacctccacctatcgctttttaccttttcaacctattccatgtggtatctttctacctgtcgttatccgaaatctctctacctgtcatcttttgtgtaatcatcattttcttttcatttgccggcactttccatctgccggctattatctcacctacctgtatattctacgaaattattccgaccatccagataaccgctcaatcgatttcctccgatgtatacatcatccaggtaagatacatcattgcgaccgtaatccatgcgaatggaagtctgtgcataattctcccagttccaacggaaataatattcgaatgtctccacatgtccattaggatattccacccgaataaaatcaacgcctgtccggtccaaataaaagtcgagttcctgacggcaacggttaccgtccacatcccgataaaaactcacccatgtacggctacataaatcagaagaacgattatagtaaccaccaccgatattatcatcatcataaaaactatcgatttctacttcacaagaagtcagactcaacgttaacacagccattaaagccagtcctaagtatctaaatgcgttcgttttcatattcctttatttttaatggttcctttattaatcctatcatttatctttcgatattacaaaagtagggaatgaattctccttatgaaattgaaaattcctacttgtttaggggaattcacctaatggaagaggtaaattcccccaacgtactggataccttacagattcctaaatagctaagaagacacgcttccgccctccaaaaccttaataaacattgaatcaaacattcaattatttaatcaatgttataaatcaagccatttagcccgatttatttgcagatatcacaaaactctgtatatttgcaatgtgtttttcatagtattagatttaaggttaacaaaaagattggctgtctgggatagatagcctttttttatgctctttttttaataaacttctcaagaagccatgaagacaaacgtaaaatggcaaatactgatgtgaaaaatctgatgacaccacaggcttctataataattaataaggtaatcgttttctcccatgaatagtgagaaaaaatattctcaaaaaaaataatccgtttaacatttgaaacatagcaagttatctctttcatcaaaaaacaagtaaaaaaaatcttgctaaaagatttgcgtagtccaaaagttccccctatatttgcaccgcatttgagagagaatgcgggttcaaggaagtttgggtgagtggctgaaaccaccagtttgctaaactgacgtacgggtaaccgtaccgggggttcgaatcccccagcttccgcaagattctctagataaaaagagctaagttttatagacttggctctttttaaatctatcaaaagccggtgggttcgtctaacggttaggacacatgcctctcacgcatgtaatacgagttcgattctcgtacccactactcttattttagttagcctcttacattgaagtaagaggctttttttattgggttcatatctcaagaaatggaatataacgtaaaagaattaaaaaaggtattgattgaacaatgcaaagaagaaggtatttattacgcattgatagcaatcaacaaacaaacgaaagagatcgttttgccacaaagccttgataacgctttaaataatccggattactgcgtctttaaatgcaggaaagtgaaggatgaatataaagtagaagaggtaaaataagcataattaaaaaagaaggatatgcttattgatattgtattaagatgttaaaagatttaataattatttgagcattcaaagttttttctgtaaaagaatgttatatccatgtaaaacgattgtctttcacatggatacccgtcaataaatgaagaaaaacgctgcttacttacatttcttcactctgctcgtacaattcaaagtaagactctttatcaatccgcagtcggactctgttttcccgcttctgaccggccagattgataaataaattgaagtataattgactaaaagagaggtcggaacgatcataagtgatatcgaaagtacaggttcttcggaacgaatcgaaagtccccagcttcatacctcccttgcacataaagacttcggggaaattcgcaggcggataaggctgaaacaagctggccagctgcgcatacacataatcgatcatccattcgtcaccggatacaagcaattctcctttcagacgaagtttgactgcatatttagctgtaacgtcctgagaagtataaatagggacctgactctccgacgggtaattgccatccttatagcctagactcatggtcagttttgatttacccactccgttgaaatctgcgacgttctgatctttctgttgatttttcaagtcaatcataaacgtcagtttacccaaagtcgggtcattcggatattgagctatcgtatccagcacataatcttcttcattgaaacttcgcgctaccaatacatcctcctctccgacttccaacgccggacctcctctttcaatatccacatcgcctacagggtaatatattgcatcattatctctgacacaacctgtcagacaaagcagtaaagctgccattcctactatcttattcattatcatatacatccttattttggagacaaagatacatcttttttgaatcaacttgatttatatcaaccgtttttagtacttttgcacataacaagactataatgacatggatacactactaagagaaactgtaaataccgtcgtaaattcccgctttcccgaaatgagtatagagggacgccggcagatagaaagcatcctgatacgtgaagaatatcctaaaggagtgatcgcacttaatgaaggagaagtagcccatgaattagtttttgtcgggaaagggatgctccggcaatattattataaaaacggaaaagacgttaccgaacacttctcatacgaaggctgtatcctgatgtgtatcgaaagtctgctgaaacaagtccctacccgattgatcatagagacactggagcctgctgtcatatacctgttcccttatgacaaaatgatgcagctgacaaagcaaaactgggaaatcaatatgttctatcggaagatacttgaatattccctgattgtatcgcaaaccaaagccgattcctggcgtttcgaatccgcccgcgagcgttataatctattgctcgaaactcatccggaaatcatcaaacgggcacctttggcacacatcgcttcttacctgctgatgacaccggaaacattgagccgagtacgttcaggcgttctgtagttttgtaattttggaagctatctgcttttccggtattctttgggagacataccggtataatgcttaaagtacttaccaaagaacgactggttagcaaagtttaaacggtcggctatctcctgtatgttcatgctcgaagaatttaagagtgccttcgcttccagaatcactaattcgtcaatccattcccctaccgttttcccgctgacttccttgacaactccggacaaatgtttcggcgtcagacacaattgatccgcataaaactttacgctacgctccgactggtaagactgaaccaaagattcatagaagcgctcaaatatatgttctttacgacttttacttttgacaacggcagaagcatccggagcataactgttgaagatattgcaaagctcaaagaagaagccctgcatcaatcccattactacctctctgcggtacctatcgtctttatttctcaatctctttctgatgaaagcgtgatactccttaatcatctcctgttcgtgcgggttgagatcaaagcaagggtaatctttcagaaagaaaaagaaggagagcacattacctactttaggcaatgattccaacaaactttttgatacagcaaagaaaatccctctgaaattggtactgaactgacgatgttcgataatctgattgggcaacgcaataaccattcttcccggaatcagttcaaactcacgcagactgatattaaaacgggtagagccttccaagcaaagtccgatgctcaccacttccagcttactgggaccattataaagggaagtaacgctctccgtgtcgaagagcgctatatcattgccgaccacatcaatactatcgggatctatatgtttagaatgaactaccgaagaaatacctatcttaggaacaacctgaatatccatacactctctctttttgttgcgacaaagataccagtaataatgaaacgttcaacctaaggctagagaatatcagtcaaatagaacacttttacccacttattgactatctccgaataaaaacttataatcacgcttggcagccggaacagtccacttttcaggaataaatttccattggttcaacgctttcgggtccatagtacctttcttttctatataattcatcagataaaaacgaaggtccttatccgtagagaagataatacgttctttcaatttctcctgtgggatgcctgatcctttcgtcagcagttctccgccgccgttcccccgataagagttcaaagccaccttataaatcttatccatgaggaaaggactaccgtctgccatgctgacaatcgttatcttctccccttgcggcttggtgacgtctacggtataaataattcccgatgccgaatcaaaattgaagctgaaattttggaaagaagctctgtcttccgccccttcgcgacgtttctccttaaaccaaagcagatgatcgtccggagacttcatccggttagtccacatgaaataagacatttccagataatccttgatttcttttccggataaagtcatcatatacagcatattctcatacttatacagattgaacatatcgctgacaaacacatctcctttattaattttcgcatcaaatgaaagcggtgccgcaaaggatatctccgcaccggtgatgtcaagctgcaaggtatgaatcaagtcgataaaagcagacggtccgaagaaagaaggacgggttgagatactctcggtgaatgtaccgatctttttagagacaaagttacggacagtgtcatattgaggagcaaaatgcttcataaagtcctcactgattccataatctttcgtttcggtcaatactccttttatatctttgctgcgcacctttccatctttcaatttcaaagtcacatcgatgttggacagaacaattccgttgcttgccggatcgatgaccagcaccgaatcacctgccacattcatcactttcttacattcgcgcgcatgatcgtgccccatcagtacaatgtcaaaaccggggacattctttgccacattcagagaagcgttttcgttatacttgccggacattttgaaagcctcctgtcctgcatggaacaagccgatcatcaagtccggattctctttttcacggatgatcttcatccatttgcgtgcagtctcctccatgtcgtcgaaacgcagtcccttccacagattctccgagagccatgcggggatggcaggggtgatcattccaaggattacgattttcactccgtcacgttccatgaccttataaggaggaagatgaggttctccggtcgatgtatcgatgatattagctcctaatacgggaaagtcacaggtatttatccagcggtcgaacacggctcggcctgtctccacatcatggttacccatatttccggcatcatatttcatgtaattcatcatttccgcacagaggtggggtgatactgtgtctatataattatagtaataggcagtcggttgcccctgcaatatgtcgccgttgtcgagtaaaataagattctccttatattgttcgcgttctttctgcacaaaagcatagattcgcgccagactgccctgccaatccttacgggtaataaaattatagggataataattaccatgtacatcacttatctgcacaattttcagcttcactactttctcctgtgccgcaactgagagcacgaggcaaagaagccatacgtaaatacatacaattcgtttcattctttttctattttaagcggatgtgagaacatgaaccgtgctcctcccgtatattcggggtcgatccatatatcccctgtccatttatgtacaatcaatttacagatagataatcccaaacctgttccctgagcatattcgttcagcttctcgaagcgctcgaataccagtttcagcttctccttcgggatgccgcaccccgtatccgtcacggagaatacagccatctccgtctcttcattcaccgaaaattccagtgttatctgccctttcctagtgaacttatccgcattagacatcaggttgataatcacctgctgcatacgctgtatatctgtcgtcatccgaaacgactcgtagctgctgacaaacaggaactgattgccggactgccgtgaaacgctgacagatgccaccacctgcctgcatagctgcaccacgtcacactcttcccaagtcaacgtcaccctgttcgcttccaagcgtgagagatcgagaatatcattgatcagacgaagcaacaaatccgagttcgtcttgataatctgataataagtctgctgttcttcttccgtgttgccacccacagcgagcacatccgagaaacctacaatcgagtttaaaggcgtacgtatttcatggctcatattggcgaggaaagcacttttcagacggttcgattcttccgcccggtcttttgccacccgcaggtctttttccgatttcagcagctcgtccttcagacgtttggtgcggaaatagtagaagagcgagatacacaagcctagcacaaggatgacaaccagcgcacacgccgaccaaatctgataagtatattgctgatagaatgatacggtctgattaataatctgtacatcaaaaggaaggatgtccgggtccagtccccactccttcaccttccggctgtccagtatggctttacaaccaatcacagaaaggtgctgctggtcatcctccgggtactgatcaatctgcacagatgccaatgccatgtctttccccagtttccggtaatcgggcagcactccgccgatcgcccaataccccagactcaccgatgacggagtaaaagccggaatgctcggagtagcctccatcatggcataagtagcattccgcatgaaataaccctcgttcatatccacacgccacgtgcctaccatgatcaccgtattctccggcaaatgacgcaactcttctacaatagtatagatagtatgtcgccggccgtccattaggatcaagtcgagttcgggaaactttttcatttctttccgcaccagtgcctgcatggtgacgccgccgtaagtattgtccgaaataaaggcgatgtgctccgtacccggataaaacgacttgatcatacggacattatcttctatattgtactgattgataaatcccgacttcaattccggtacattcatgtggtcggtaaaaagatcgaccgattccggcatccatgtgtccagtccggcaaccgtatccttgggcagtatgacgatgttgctgctggcgaggctgcacatcaccggcactttcacctgtatcgaatcccgttgcgacagatacgccgcccatgcttcctgccccagcagaataatttgcgccggatgcttctccccttgatatttagaaaggatctgcgtcatcatgccgctccaaagcggggcttcggagaaacttttgcagttcatgttttcaatgataatatcacgtttccctcccagtttgttatattcttccatatagtcggagatagtgaccgaagtttgatgtgcggcggggttgtaggagcagataatcaggatgggtttctgatcgttagagacagcaaataactctgtggcccggaaaagccatagcaaacagataaacaggcaccctatatatctcatcatactcgtaagttttgaagtgttactatctcattttagcctgcaaatatactaaaacttgtcggctataacagatttatgtgtatttttgtcgctcattcattcgcaaaaaaattgtttatggaactatttcaccaaatgatttccggattactgggaataccggaaagacaaatcagcagtacactccgcctgttgggcgaaggtgccaccatccctttcatcagtcgttaccgtaaggaagctaccggcggactggacgaagtacagatagagaacatcaaggagcaacatgacaagttgtgcgacatagccagacggaaggaaaccatcctcagtaccatcaacgagcaaggcaaactgactccggagctcgaaaagcgcatcaacgccacctggaatcctacggaactggaggacatctacctcccctacaaacccaaacggaagacccgtgccgaagctgcccgtcagaagggactggaaccactggccatgatcatgatgctgcaaagggagccaaacctcaccgccaaagccgccaccttcgtcaaaggcgacgtcaaggatacggaagacgcactgaaaggcgcccgcgacatcatcgcggagcaagtgaatgaggacgagcgtgcccgcaacgccatacgcaaccagttcacccgtcaggcggaaatcaccgccaaggtagtgaaaggcaaagaggaagaggccgccaagtaccgggattatttcgacttctccgaatcgctgaaacgctgcacttcccatcgcctgctcgccatccgccgggcagaatccgaagggttgctgaaagtatccatcagtccggatgacgaagcctgcctggaacgcctcgaccgccagttcgtacatggcaacaatgagtgcagccatcaggtaagggatgccaccgccgacgcctacaaacgtctgctcaaaccttccatcgaaacagaatttgccgcccagtccaaagaaaaggctgacgacgaagccatccgtgtattcacggagaatctccgccagctgcttctctctccccctctcggacagaaacgggtgctcgccatcgaccccggattccgtaccggctgtaaagtcgtctgcctcgatgcgcaaggcaacttgctgcacaatgagaatatctacccgcatcctccggtcaataaaaccggtgaagcggcttccaaactccgcaagatgatagaagcctatgaaattgaagccatctccatcggcaacggaacagccagccgcgaaacggaagacttcatcaatcatcagaccttcgaccggcagattccggtcttcgtggtcagcgagcagggcgcttccatttattcggcatccaagatcgcccgtgacgagtttcccgattatgacgtaacggtgcgtggagcggtctccatcggtcgccgactgatggacccattggcggaactggtaaagatcgaccccaaatctatcggtgtgggacaataccagcacgatgtagaccagacgaaactgaagaaagcccttgaccagacagtggaaaactgcgtgaacctggtaggcgtgaatctgaataccgccagcagtcatctgctgacatacatatccggtctggggccgcaactggcacaaaacattgtcaacttccgtgccgagaacggagctttcagttcacgcaaggagctgatgaaagtcccccgcatgggtgccaaagccttcgaacagtgtgccggcttcctccgcattcccggagcaaagaacccgttggacaacacagccgtgcatccggaaagctaccacatcgtagagcaaatggcaaaggacttgaaatgtagcgtagacgaactgatcgcgaataaggaactccgccaaaaaatcaaaatatcggactacatcacgccgactgtgggcctgcctaccctgcaagacatcatgcaggaactcgacaagccgggtcgcgacccgcgtaaagcgatcaaggtatttgaatttgacaagaacgtgcgcaccatcgcagacttgcgcgaaggcatgattctgccaggcatcgtaggcaatattaccaatttcggagctttcgtcgatataggcatcaaggagaacgggcttgtacacctctcccaactagccgaacgatacatctccgatcctacagaaatcgtgtccatccaccagcatgtcatggtcagagtgatgaacgtggataccgaccggaaacggattcagcttagcatgatcggggtacagcaagactgattgcctcccgtttttctccccaccaaacaattaaaatcgtaaagataatcatcagtactgtacaaatgagcgagccttcaaacccgaaggctccgccattcagtacgttctcttcgggcagatgcagcgtcagcagggatgtcccaaagtcatttccacttacctgatagcccagtatcgggccctgaatccagttccagaaaagatgaagggaaatagggaaacaaagattgcgcgtatataaataggaagcgccgataaacatacctgcaagtaacagattcagcataggcaggaaggcaaggttcggattgaagaggtgcagcaatgcgaacagcagtgcggagacaaaaagagacaggaatttattcatccgggtatgcagcagacggccgagtatatagccacgcatcatgatttcttcggccagagccaccagcaggcagaacacaaaggtagcaagcagattcagaggatcgaattgaaagccagttacttccacctcacccaaagccaaagacagtccgaagccgatcaagtagagaaggatggctgccagcagtccgtaccacaatccccgtgcatgacctttcagtgtcagtcccaggtcagagaaagggcggcgctcaaaatagagcagaatcactgccgaagtcagcacagccagcagcataccggcttccgccaccatatgccccaacaatccggggtgccttgcctcatcaccaagaatcagagataaaactccgaagcctatcgtactatacaatccaaaggtgacgaaaagccccagtgcaaacaacaggatgcacgcccatacgggaagtctcttcggttctttcttttctctgatttcttctgtctccatttttactttttgttaatcacgctacaaaattagatataaaacataaaaaaacatcgtgtcttacctatttttcctatatttgtctgaacaaatctgcataattatgaaaataagacaactactgataagttttttattggctgccagtactttgggagcaaccgcacaagtaagcaaaacgtattatgtcagcaagcccggcacattgatctcgatgatgacggaagaagaagccaacagcatcacccacctgacactgacaggaaaactgaacgcagaagacttcagacatctccgcgacgagtttcccagcctgaaagtgcttgatatctccaatgccgaaatcaagatgtacagcggaaaagccggcacatatcctaacggaaagttctacatctatatggccaatttcatccctgcctacgctttctcgaatgtggtgaacggagtgaccaaaggtaaacagacgctggagaaagtgatcctttccgaaaagataaagaatatcgaagatgcagccttcaaaggatgtgacaacttgaaaatctgtcagatacgcaagaagacagctcctaacctgctgccggaagctctggcggacagtgtgaccgccatcttcatcccgctgggcagcagtgatgcctaccgttttaagaacagatgggagcactttgcatttatagaaggtgaaccgctggaaaccaccatacaggtaggcgcaatgggcaaactggaagacgagattatgaaagctggtctgcaacccagggacatcaacttcctgaccatcgaagggaaactggataacgccgacttcaaactaatccgcgactatatgccgaatctcgtatctctggatatttctaaaacaaatgcgacgactatccccgacttcactttcgcacaaaagaagtatctcctgaagatcaaactgccacataacctcaagaccatcggtcaacgggtattcagcaactgcggacggcttgccggaacacttgagctgcctgcgagcgtgacggctatcgagttcggagcgttcatgggatgcgataatctgcgctatgtgcttgctacaggtgataagattacaacgctgggcgatgaactcttcggaaacggggtgccgagcaagttgatttataagaaataaaaaaagtataatccacattggacattgatttatgctatgtagaagatacgaggatagatcgaaaataaattagctattagcatatttcgattagctattagctaatttgtttttgctaatagctaatttcgatttgctcatagcgtatttgaaagaaaagaatgacaaaaccgatcaattatttcacttcgtcattggcatagagagaaaaagcttctcgtttgtcacaactttcttttatttcataatttctcccgattttcacaactcttttttcttatgacaatcaaggaaaagtcacgaatttccttcctttcaaagtccaataaagtccagaaagtccatattagatttttagaatacacaatctgcgatataacttactatatttcaagcattaacaccttaatttattaaataataaacagcgcttctagagaagtttaattcctctcccgcaacacatgaatctttagccccaaaaactgtctaagcttctccgaaagatgcgagatatgtcagacgattgcacgttttcgtgtcttcgacaaagcttctcacgcaggtgttgaccattttattatgttcaacgtaatatagtaaaatggcgaacgctacttcgatatacgtgcgactgatattgtcaagaataaataagaagactgttcaacatcttccggttcgtccggcaacacacgtaacaataaataacaacaactattcatcctattcacgttattttcttatgatggagacacattttgaagatggtgggaatcagattgcaggtttagtccgggaaaatttaaatatgcccgccaagtccttctctgctcatttcttcctcgtttttaatccaatttccgttttctgaaaatcctatagtggacttttgaactttactggactttgctggaggaattttggaactttcgatctctccctcagcaacacatctaaataaactttattttacaaacagtacaatacaagtttatatacttcaatatacaaaaggaaagggaaaagcaatgtgacgacagtcaacaagcatttccctttatttaacagtaaggtactatttatactaccttctatacattattcagtgtatccggctgatacaacacgctatttatcaccgtacatcttcgtcctcaactccttgatatggtccgaagtgatatattcgtcatattccatcatcttgtcgatgataccgttcggagtcagttcgataatgcggttggcaaccgtctgaataaattcgtggtcatgcgaagagaagaggatatttcctttgtatgtcttcaggttgttgttgaaagcctgaatagattccaggtccaagtgattggtcggagtatccagaatcagacagttcgcattgcggagctgcatacgtgcaatcatacaacgcatcttttcacctccggaaagtacgctgactttcttcagtacctcttcgccggagaacagcatacgtccgaggaagcccttcatgtacacttcgttaccttcgccgaactggctcagccagtccaccaggttaaggtcagtgttgaagaagtccgtattgtccagaggcaggtaagccgttgtgatggttactccccagttgaactgtccggcatccggcttcatgtttccgttgatgatttcgaagaaagcggtcatcgcacgcgggttgcgtgaaaggaataccactttgtcgcccttttcgatgttgaagttcacgtcactgaacagcactacgccttcttccgtcttcttgctcagtccggaaacttcgaggatctggttgcccggctcgcgttcgggagtgaagatgatgcccggatacttgcgtgaagaaggtttgatttcttctacattcagtttttccagcatcttcttgcggcttgtggtctgcttgctcttcgctacgttggcactgaaacggcggataaattcttccagttctttcttcttctcctcagccttcgccttctggttctgctgctgacggagcgccagctgactagattcgtaccagaaactgtagtttccggcaaacatattgatctttccgtagtcgatgtctacggtgtgcgtacatacggagtcgaggaagtgacggtcgtggcttaccaccagcacggtgtgctcgaagttggaaagatattcttccagccaggtcactgtttccatatcgaggtcattggtaggttcgtccagaaggaggttgtcggggttgccgtacaatgcttgcgcaagcatcacacgcaccttttccttaccgctcagctcacccatcaatgtataatgcttgtcttccttgatgcccagaccgctcaacagcatggctgcgtcactctccgcattccatccgtccagctcggcaaatttctcttccagttcggatactttcagtccgtcttcgtccgtgaagtcttccttggcgtacaatacttcacgctgcttcataatgtcccacaacacggtgtgccccatcattacggtgtccattaccgtataagcatcccatttaaagtggtcctggctcaacaccgacaggcgttcgcccggtcccagggcaatcgtaccggtcgtcgggtccagatctccgtagattgtacgaaggaaggtggattttcccgcaccgttcgcgccgataataccatagcagttgccacttgtaaatttcaggttcacgtcattaaacaagactcttttaccaaactgcaccgaaacgtttgaaactgtaatcattttctattatttactattttaccagttactatattattatttgagcgtgcaaaggtagacatttaaaatgaattatgagctatccggaatgtgtcaatctggcataaatgtattacctttgccacgttttttggcaaaacggtcagattggcaaagtttttgcttgggaaattgatattatgaataaaaaataaaaataagatatggatccaaaagaaaaagaaaagatggctgaagagctgaatgtggaagaaacaaaggatacggcggaagaacaaccgcaaaacgatcaggcagaagaggccgctcccctgactcatgaggagcagctcgaaaaggagctggaagatgctcaggctgtcatcgaggagcaaaaggacaaatatctgcgcttgtccgccgagtttgacaattaccgcaaacgtaccatgaaggagaaggcggaactgattctgaatggtggcgaaaagagcatcagcagcattctgccggtgatcgacgactttgaacgtgccatcaaaacgatggaaactgccaaagacgtaaaagccgtgaaggaaggtgtcgaattgatttataataagttcatggctgtcatggcacagaatggtgtgaaggtcatcgaaacgaaagaccagccgctggataccgattatcacgaagccattgccgtcatccctgccccgtcggaagagcagaaaggtaagattctggactgcgtacagacgggatatacgctgaatgacaaggtgattcgtcacgcgaaagtagtagttggggagtaaatacaaaagttagtttagttaagaagcatggcagaaaaaagagactattatgaagtgctggaggtgacaaaaaccgccacagtagaagagattaaaaaagcctaccgcaaaaaagcgatccaatatcaccccgacaaaaatccaggtgacaaggaagcggaagagaaattcaaggaggctgccgaagcgtatgacgtgttgagcaatccggacaagcgttcgcgttacgaccagttcggtcatgcgggagtaagcggtgcggcgggcaacggaggtccgttcggtggtttcggtggcgaaggaatgtctatggatgatatcttctccatgttcggtgacatcttcggaggtcgcggcggtggtttcagcggcggcttcggagggttcagcggtttcggtggcggtggcggtggttcacagcaacgtcgctatcggggcagcgatctacgtgtcaaggtaaagatgactttgaaagaaatctcgacaggagtagaaaagaaattcaaactgaaaaaatatgtgccgtgtaatcactgtcatggcacgggtgccgaaggcgacggcggttcggagatttgtccgacctgtaaaggtagcggttcggtgatccgtaaccagcagacgattctgggtacgatgcagacccgcgccacttgtcctacttgtaacggtgaaggtaaaatcatcaagaacaagtgtaaagagtgtggcggcgacggtatcgtatatggcgaagaggtagtgacggtgaagattcctgccggagtggcagaaggtatgcagctctcgatgggcggcaagggtaatgccggaaagcataatggtgtgccgggcgacttgctgattctcgtagaggaagaaccgcatccggacttgatccgcgacgagaatgatctgatctataacttgctgctgagtttcccgactgccgcactgggcggtgccgtggagattccgacaatcgacggaaaagtgaaagtgaagatcgactcgggtactcaaccgggaaaagtgctgcgtctgcgcggcaaaggtctgccgaatgtcaatggttacggtacgggagatttgctggttaatatcagcatttatgtgccggaagcattgaacaaggaggaaaagagcacgctggaaaagatggaggcttcggacaacttcaagccgagtacgtcggtgaaggagaagatcttcaagaagttcaagagcttctttgactagctttctttggctgggtctgtttttaagatcatagtcattcacacagagatataataaagagtgtgtgtcaaaagtcaatagtcaccccattttagttactattggcttgacacacactcttttagtttgtattggatattataaatggatgaaaccagctaatatcccggattctgctccagttttgtattcattacccgtatcttttccggaatcgggaatacggtggtatatccattattctcatcgggaagttgcggacgactgctgtatgctctcgtgaacgctccgaaacgaatcagatcctgccgtcgccaaccttcccaagccagttcgagctgtcgttcggcaaggatattttctaatgtagccgttcgggaggaagcgttgacacgcccgcgtacttcgttcagctcggcatctccgtcttccccattacgaacctttgcttcactcttcatcagcaggacatctgcataacggaacagtacaatgtcgttctccatcagtttaccgtccttggtagccgtttcgtctacctcgtactttttcatgcgtgctcctgctgtctgctcatagggagtattcgagatatccagttcgactttccacggcaaatattcgagaacggttccatcgtccagacggactatatttccttttaaatcatatacgactccggcaaaatagcagatatcgaaacgcgggtcctgttgcgctgtttcatagccgaaggtttccagagcttcgatagtagcgctcggtccgttttcaccgctcagtccgtaggctttggcgtgattgtaatggcgggaacggaaaaggtattgcatctggttggtgtacaaggtcttgttcatcgggatggtgaagatattctcaacagacggttcattgaatacggcaaagttggttttgtaatccggttccagacgatagcccatttcttgcagttggtcacagtaagcgataaccgtctgccaggcattgaggcggttgccgtctacttcgaaaaaaagattctttccgtcgggacgctggccgtccgtccagtcgttgtcggtatagacttcggcattcaaggcaagctttgccaagaggaaaacaactacaggacgggtgattcgtccgtaatacggaccggactggttgctgtggacttcggccagcaaaggggcggattcttgcagttctttgaatacaaagtcgaatatcgttttccgttcgctctgcactacgtctttcatcgacggggatgaggtaagtacaagcgggacacgtccgaacagatccatcagataatagtaatacatcgcccgcatggcgcgtacttcggcacgataggcgggaagttcggcgtctgcgtgggtagcactgaatttgtctattcgttcgagggatttgttggacagcatcaccactttataaagatattcccaagtggcttggatggcatcgttttctattccccattggtgcaggaacagaccttgccaaaagccgccgtcgtaccaatcgccgccacgggtggggataatggcttcgtcggtggtgaaggtgttcaggtcatagactcccctacccgtcccctgcaatccctgactgtcgctataaccgccgatgtaggtgtaaagtgaggctacggcattcagatatacatccgagatattgttgtagacttcatcttccggcagtttgtctctgggactctcttccagaaacttgtcgcacgagaagaaggtaatgcacacaataagaaagacaactgtttttttcaggttcatcttcccctcaagcagattccccccaagcagagttgcttttccatcatatagagatttactctctaaataccatccttgctgctgcaaatatcgctttatctttttcattattgttttcctcctccgttaaaagttaatactcaatcccaacgtgtaagtccgcgctaacggatatccgcgtttgtcgtccagccccaaagtggagttgaccgtcgagctgttgatcatgggcgaaagacctgaatagccggaaatcgtcgctaggttgttgactgtaaatgccagtcgcagggagcggacatatttctttagtttctgcaccttttctatcggtacgttccagccgagtgtcacgtagtcgaagttgacatacgctccgttttccagccagtagtcggtggcggtctggtctttgatattgcgtgcgggagcttcctgcatcacattgtagtcggggaatatgttcatgttcatataggtcagggaggttccgttgtatattttgtgtccgaaggcgccgttgatctgtactgaaatatcaaaacgcttgtaacggaaactgaggttcgatccgagaattgttttgggtacggcttgcccggccacatagcggtcttcgccatcttcgaggctgacgccgccgccattgaggtcggctatgtcataggtgtagccgccgtttccgtcggaaacgagtccgttggcacgtggcaggtagaagacacccagcggctggcctactacttgataaacgatgtggttataacctccgtgaaagccggctccgtcgaggctggcaagactcttgtattcgggggcggaaatcagttcgccattgtacataccgctcagagaaagcaacttgttctgctggaaggtgatgttggcgttgatattcagttccatgtcctgagtcttcaacggggtgatgccgatggctatctccagaccgctgttgcgcatggagccgatattcgccagcagggtgttgtaggtaaagggcggtacgcttacgttgtagaggtagagcatatccgtcgttttggagttgtaataattggcggagagcaacaggcggttgccgaacatggcaaggtcaatacctgtattgaaggtatgtttcacttcccatttcaagtcgggattcgtgtttcgcaagtctcccaatgacacggctgccgagtttcctacgggaatcactccgttcggtttgacaaggctcagcgtggtgtaggagtcgataccgctctgattaccagccaaaccgtaacctatacggaacttcagattatcaatcacggggaggcgtttcatgaacttttcctcactgatcacccatgcagcggagacggagggaaagaatccccatttgtgattggctccgaatttggaggaggcatcggtacgggcggtcattgtcagactgtagcggtcggcataggtgtagttgaagcgtcccatgaaggaggccagatgcggttgctcgtagtacgagttggttccctcccacggacggagagcgccggcttgcagattgtggtagccgaatttatctgtattgaagttggtgactgtggtatagaatccggtgtatgtctccttctggagttccgccagtgccagcgcgtcgaagtaatgcttcttccagcctttcttgtaggtcagcatcatgttacccaggagggattccatctttttcgtgcctttgtatgcctgtccgtgcgcccagacggaggtgggcagatattgggaattttcgactatgttataggtataggcaccgaagagaaccagtttcagttcgtccatcagattgaaagtcagacgagcgtgagtactgatatgcgaggtggcgtcatgatcctgtacttccatccatgccaacggattcgtgatctgactggcggtagtgattccgtcccatgaaccggaatcggggtctttgtgattggggtatgtgggattgaaagtggcggcagaatagaaggttttctgaaggtctaccagattgtgattcttctggatagaaccgaacatgcccagttcgcagttcagaaaaccgtcgaacatcctttgggtcatgttcatattagaggtgaagttcttcatgtcctcgttcagtatgactccctgacggtccatgaaaccgagagatacacggtagctggattcattcgagcctccatagaaggcgatgtggtggttttgctgcaatcctgtttgttctatctctttctggaagtcggtgttgtttcccttgtccagaatggagatgccccgttcggatgcaacccggcggaagtcatctgctgacagcattttcagattcttatagacggtggatattccgaagatgccgttataactcacttgcgttttaccgctcatgcccttcttggtggtgatttcgatgacaccggaggcgcctcgtgatccgtactgtgccgtttcggaagcgtctttcaggatggtgaagctctctatgtctgtaggataaatggaggtaagcatactcaaatcgccgaagactccatcgacgataatcagcgggtcgtttccgctggtcaatgaggtggttcctcgcaggcggactgcatctaaggcggcgggaccgtttgtcccacgctggatggtcaggcccggtactcgtccgcgtatggcttccagcggattcgtgatctggtctttattcatctgtgtctccgtgattttctccactgatccggatatggtttttaaacttccggtggcgtatcctaccgttatcagagagtctatcggagtgatcgtttttctctgggcaaaggcacttccactggaagtgatcagaaagaaaaggctccaaatagtaagtctgtagtgttgtttcataattatcattttttaagggataatacaaatataacaaaaaaagcgggcatctggttgtccggatacccgcttttctttgatatgggatataaaaattatattgtcaacgtagatgaatacaacaaaccgcttgattggggaaaatcaagcggtcggctatatctgactgactatatcttgggggatatactgcgatcaatcagactgaaacgggctatcgtttattctcaggtttattcttagaaccggattacgatttagtacctttttcctgtccgtaaccgtatccgtagccatagcgtttgccatatccatagtacttgccatacttaccgtagccgtagtagtagccatacttcctgcgtttcaggtctacgccgttgattacggtacaaaggttaggcagtttcttttcttcggcaagttcgttgatcagtgtgtactctactttatgggtatagtcggcacggcatacgtagacggacaagtccgctacacgaccgatcaacaaggtatcggtaaccatgcctaccggtgcggtatccagaatcacatagtcaaagttcttcttcaagatctctattgccttgtccagaccatcacgcgctaacagctcggtcggattaggaggaaccgttccaccgggaaggatatacagattctgattaatatccgaaggttgtaccagactcatcaaatctgtttccgggtttgcaaggtataaggtaatccccttctcttttgtcgaaagacggaagactctattcaatcccggtttacggatatcaagccctacgatcactactttctttcctaataaagagagactgatggctaaattggcggagataaatgattttccttctccactgacggtagaagtcacaagaatcactttcttgtcattctgaagcatgaactgaaggttggtacggatgtttcggaaggtctcgctcatcaggttgttctgattctcaaagacggcaatagaaccgtctttttcgttcttctcgtcggttaatgggatatcaccgacgataggaatagttgtcagtttctcgacatctgcacgaccttcgagtttaaacttggtcaggccgatcaggtagatgatgcctacggggatgccaatgcctaatactaaagcgatcagataaatcattctacgcttaggagaaacagggatatcatcagcgatagcttcatcaatgatctttgcattgtttgcagtagctgccaatgctatggcgttctcctcacgcttttgtaaaagcatcaaatacagtccggctttgatttcctgttgacgggcaatacttacaaactgacgttcttgtccgggagcatcactaatacgacgagaaaaacggcttgcttcacgttcaagatcagcttttgtaattaataaacctttcaatgatccgtcaagggtcgcctgcacattcgacttcatggcacggatgcttgtatccagattgataatcgtaggattattttctgtagaagtacgtaataagcgcttccgttcaactaacatttcattatatcgttcaatcgttgcaaccaatcctggatcttgcaagcctatattacccggaagaacttcgtattcatttcctcttatatatttccgcaaatcttcaataaggctgatttgtgtccggttctctactctcttcttttcatattcggcgttaccggtcaaggcaatttgcgcttcactagtcaagtcggtaataccggcattacgcttgaagttctccagattcacttccgtacttcccagttctttcgagatgatattaattcgttcatctataaattcagcagtcttttgagcaatctcatttttatcattattggtattacggttgtacatttccaatagctggttaatgaaatcctgtccacgttgcagactggagttctttagagatattactgctactgaagtcgttttagaagtgggctcaattctcagattctcacaatatgctctggctaccttcatcggtgaattgatcttagccgtaatgtgacggatattttgagtggaagattcttcggttgtatctttctttaccatcagcgaatccggtgattggaagaaagctaaagttccttcatccataggaaagacagcaggaagtttctcaaaatgcttttgatattcttttttgccaattgttactcctacatccaaactaccttttggatgcaatgacatctcaactatcatcggatcacttaacttctctgcttcttgtggagtcagactaaccagaacaggagaagtcttatacatattcttggaagggaattcatcttcgtctgtataagagacatacagatttaacagattgaccacctcctttaccaaagtcttggaacgcagaacttcaagttcattatctatattttgggaagaccccgttagaccacttaatcccagttcttccaatcctgccatactgcctgtattaccaccttttttatcatccttaataatgactgtagctgagatattataaacaggagtagccatacgcaggtatatccatgctccaataagacaaactaaaactgcaccaacaaaccacagccaatgaataatatacttaaaaagtaattcttgaatatctactttttcatcatcagcttcacgttgtctcacgtttgctatttcttctttcattctttcaaaacgttattttaagatattaaataataagctggctaaagacaccagaatggaggtagcagagaaccacaggcttgtgctgttaccaatgtctgagttacgggcttttgctttattgggggttacataaacgacatcattctgttgtaaccaataatagggagaaagaattgtttccgatttattcaagtccaaagttataatttcttgtttgccggtggcatcttcacgaatcagctttacattatcgcgtaaaccatatactgtcatatcccccgccatagcaagtgcctccagcagattcactttttcattagaaatagtaaaagtaccgggacgtgttacttcgccaattactgaaattttatagttgaccatacgtactgtaacaataggtgtctctttcatatatggtttcaacttttctacaatcatctgctctgcttgtttctttgtcaatccacctaactttaattctcctaatacagggaaagagatctttccttcattatctaccagataagtttgcaacacaggctgtgtagtagccaaagtattggctacagacaaatttgtaggactggcaaccgtcaaattaaaaggtgctgccaattccggacttgtacaagacactacaatagtcaacagatctttaggcatgatctttgcatcgtacaatttttctttctgttctatttgatttactacttctgtatcctgcaaataaggtacttttttgtaggactggcaggccgcaaacagaaaaggcagtaacactacaaaaatcaatttattaaatattctcataactgtgatgaattagatatctactcttttatacttagttgttttgattactcattaatttaaactcttaatatgcctctttttctccatggatagcattatagactgttttatagattatatacagatcaagcataaacgtccaatgttcaatataccatatatcacgactcacacggccttccatttgccaaagctcttttgtttctccccgatatcccgtcacttgtgcccaacctgtaataccgggctttacaaaatgacgaaccataaacttattaattacctgagcatattcttccgtatgtttcagcatatggggacgaggaccgacaacggacatatctcccctcaaaacattaataaactgtggtaattcatcaatactcgttttacgtataaactcaccaatacgtgttttgcgaggatcatttgctgtagcttgaagaacatcacattgtgcatttactcgcatagaacggaacttgtaacaccaaaattcacgaccgtcttcaccactacgtttctgtttaaaaaagatagggcccggtgaactgatttttatagcaatccctattattatataaacaaaagggaaaatagtacacaagaatatcaatgaagatattatatcaaaaatccgttttaaaacacgattctcacgaagttccaatggttcacgacgaatagataataccggtacattacctaataattcaaaatacatcctgcgctttaaatagttacgaacattgggaacactaaaaaaacgcaccaagtggttctcgcaataattaatgataggaacaatctcggcacttcgtacagaagggagactgcaatagagttgcgctatcttgcctgcattttgttccaaatattcaatcgcttcttttggctgtcccaagtatgcaacttcttccggataacaatcggaaggagaatcttcaaaatatcccataacacgatagccggaagtaggatcgtctgtcatcgaatgataaagctcctgcatattctcatgactgccaaccaatacaaccaaacgaacattccctccttttttccgataaagctccagaaaataacggaaagaaagacgatagcaaattaagattagcatcaaagcaacataatacaagccaaataatcgggaacggaaaaattcaaaatgaaaaagagacaaaaagcaaatagaaaataaaacaaaaggtaccatattgcgaagtacacggatcataatctgttcgggacggacaaccggatggtgcaagattactcctgactgaatattacaaaccaaatagcagagactaagcacaaccattccttgataaagagaagaagtaacgcctaaatagaacctgtttcccaaagtcagttcaaatccccataacagcaagttcaataagagaacatctcctaaaaggacaataaattttaggactttattgaaacgttggacttcctgcataaattatttatttatatattgacaaataatattttatatttacgtctgctatagttaataataagtctttagacattctgatcatatccattcaattgacttattctggaaaaatagaagttctgcattcttaatgcttcacttttagaatcaaatccgttttttttcacttcttctgcataacttctacgtctaggcgtataatcttcaattacttttactattttatcagcccatacacttggggagacttctaatccaatgtaatgcgcaagttcagatgctgtagtttcttctgtgatatttttagaaaaaaagattggaagtcccgcacattgtgcctctattcctaccacaggcattccttcatacaaactaggtaacaagaaagcatcaaaagcattataaaactgctttatgtcatctctccggcccaaattcatcactctgtcagtaatctcatactccttaattctattacacatttcgttctccaattctccaaatccaatcataaccaaaactgcattttcctgtatctttgcaatctcattaaaagtatctatcaaaaaaagtggatttttctgaggaacatatctgccaataaagccatataccactttattttcccatccaaagttttttcgagcactttctctcagtttatcatcaaaagcattaacatctgcatcgatcactgttttaaagatactgacctctcctttatcataggtcttcttaccaaattgccaaataccgcaatcgattgaattagccatataacagtttgtaaaccaatgagagaaagggcgcaagacatatttaatgagtgttttcttttcattcttatcacctttcgatatgctttcggatatcctcactttaactccggctatcctagccaaaaacattgggaatatattaagagtattatcaaaagcatgtaccacttcatactgattctctttaagaatcttatatgtttcttttaaatgtggaataagattcttatagggtgctactttatagactcttcctcccaaagatttaatttcttcttcaggaataccattcgaatcagagtcacaaataaagtcatattgcacttttgtacgatccatatggcgatagtactccattattaaattacgtttccccccagagtgcagtacaccggctattatagcgattcttagcatattactatttctttatagattcatgataaaacaaagaaattccatccagcattggtgtcaaagtcacatccacaaactgtttcattttttctatatccaaaaccatattggaaacatctacagggcgtgcatttttatactcgattttaaagtctgcctttgaaataattttcaaaaaagcaagtacatcgttcactgaaaaacctctgccactccccaaattgattgtttcattgtaaacatccttatttattaactgataaaagacattggcaaggtcttctatatagatataatcacgaatggcagaaccatccccccatacttccaccggtttattctctataattttaccgatagccactgctaccaatccttgtttcccatacagattttgcccatgcccatatgggtttgaaggcctcacgatgagatactttaacttctgagttctattcttaaacaaaatactattttccatcatttgctttgaccatccataataggatattggttccatactgtcagtttctacaaacgattgaagagttgttctattaccataaattgtcccccctgaagaaaaataaacgaacttaatatcttcgtttgcacaaaattccatcaactcaattgaaggaaatatcacattcttaaattcattgatataatcatcgtaagcactaccgggaatcagtgttgataccaaatgtaccaccacctctattttattagttaagaggatattctttacttcatttatattactcaaagaattcctaaagacctttagattataatctttcagtctcgatatattggcaaactccggttccagaataaatactgaatgcttttcatcagaaataaaacgcttcaccaaactagatcctataaaacctgctcccccgataaataatatattcataaaattttatttttattctccaagtttttgctgtagctatcttttaatttcccgactccccataatcgccttgaatagttttttcatatgtttatacaatcccaaccgaacagtccacagacgaacttgcttttccaaacgatgccgtaaggttataggaaaatatttacgaaaacaagtttctgtatccaatatatttaaatctgtaaagaaagcatcacgcttgggattcacgctaacggaataaaacatctctttcacaccctctacagctttattgggatttatctccagcacttctaactgagaattggattctttcaatatgacattagctaaatctgaatgtgccaaaatacgggttactcctttgtcattatccaatttcttactaaacttatcaacatcgaagcagtcccatattgtaaaatctgtattacgataacgctttttaaatgcacattgataacaactaggacgaacactcatattagcaaaaaaagcacgcatcatcacatctgtatcaatcccttcgtgatattttatggaagtatcccggcaaataatagacatagtagaatatttatatccatgatatttgtctctaaacaaaacatttgtaaactcagaaccaatcttcttcttttgtacttccagatattttcgataaaccaatggagaagggcaagcatggcagactacatccaccgtaactaacttctcataagatttccttaaaaaggaaaacaatccttctaactgacaaggagtaccactgaacaagacatatcttccttccataagaaactgcttcgtctgcctgtaggtatcgcctattctactttgtacatatttactattacgaaacttcttcaagttttcataacagtctgcccattgatgtaccacttcaaaatcagcgtcaaaacctgcaccacaaaccatacctcctctatcaagtacccatttagcaatagccgtaaacgctccacctgaagtactctcacgtaatacttgcgcatttttgtgctgtactaagtaagctttctgctctttcttctcatctggctgtgcatgaatcacaggacaaatattctcgcacaatccgcactctatacatatatccgtatccacaaatgggtaaaggaaaccctcattgtcttcacacatagttatgcaacgtttcggacatacagatgcacaagccgaacagccacaacattcccttttgtctttaatagttatcataagttatacccaattgtgacaaagcaccttttatgtaccgctttgtaaattcccttaatgccgccaattttatatgcacatttttatagtcaatcgacatcaacatacatttctccacgtcttcgtctgcctttaaaagtctctcctccagtcccaccattgatagcaacgaatacaaacggccattggtagaaacaatactgtcattattataccgcctaaaagtaaaaaaacgtttctcatacaaaagagagaatacggatgcatgaaacgaatccgtaaacacatactctgcatctctaatcaactgtacaaattcggcaggtccaacattatagggagtataatcaggaaattccacatcactttttatatactcgtcacaatgttgtaactgcacaatcttataaccagttttatccttaaaacgtttcacaaactccctctgctctggattgttaccaagaaaataacagaacagataaggttccttaatgaaacgttcattttccgtgatgcaaccccattcctcggcagtgaaaaggatagtcgggtcacaaaccacaggcacatctcttccagtaagatctttcacaattttctgtccgctcaattcacgtacagagcaaaaatctaaacgtttcaagaatttagcagctttctgcgcctgccgcttaggaagctttgatataccaaaactagtagataaagctatcttagacacattatctggtacaaaatttaatgtatagtaatcagcttcaatgtttgaaggtagccacaactggtcactgcctaccacaaaagctgcatattggtgtgcagcattagtaagctcccgtttcgagttataaaccttggatatatgaaatttagtttgactgaaattattaaacatatatttgcgtaaagctatgttgtcacgatattcatttcctttagtatgagcagccagtagttttttgacagtagcccatttatccattactgtattaacatcccatattctacttaaaaaatagcgatatttcgctttattaatctcactttgcaacccattaatacagattgtttcattttctactttcatcttatcaaatagcaactgtgtggcatacgcttgcaactgactgccataattgggttgaaaatagcaagtaataagggctaactttttattagtcataatgatatgtcaataattatactttcctctttttaaataatattgctttagccaaccgatgacgggaagcataaaatatatatgtagtctaatgaacattagtgtcaacttacgttgtttatccattcccgtagtagtgcacttaaagacagaagtcgaaaataaatcgttctcttcaattacttttacaaacttattaatcttcttaaatacagaatccttattctcaggatggaaataagtattcattgctatagctaaaaccacataagccactcgctggtatagcggttctataaatatatctttatctgaaaacatcttgatatcttcttgaatcacatcaaagcaatccattaaatacctagtatttctttcatccaccttcttcgagatagagttaggattataacgataatggttaaaatattcattcacaaaaagagctttctttgcatgataaaacgagcgcaaggaaaactccaacccttcagctccctgtttcaagcggtcgtcatgccttatcctattcttttttgcataatcagtccgtatcagtttacagtaagctgttgcaatgccacttttataaataagggtatgcctggctaaatcatgacattcatcctcaatgtaaatatgctcttgttctgaacatatccactcccattttcctttgatggaaatatcacccagctcttgaatacatttccaaaaaacaatatctacatctgtatgccttgaaagataggatatcagtttctcacaagtatccatgtctatccagtcatcaccatctagatacatatgccaatcacctgttgccgcatcatatccggtattacgggctgatacaagtccaccattctgtttatgaattactttaattcgactatctttttttgcataatcatcacatatcctaggagtaaggtctctagaaccatcatccaccaatagtaattcccaatcctgataggtctgattcagaatacattcgatcgtttcgttgagaaattcttcgacgttatagcagggaacaattattgaaatagtaggtttattcattcttattggaataaaattacgactcttataaaaagctattgaagaaattattttcaaacaaattattaattgtaacacatattcagaaaactattcttgagatatagcctcctgaatatatttatcaagtaatttgcaacaggcctcttctgaatagttttcattcatgtaacacatcaattcgggttgagcataatctttatccatcgcagtcattatggcctctcctatttcatctatattcataggatccaccaacacagcacgaccatcataatattctttaggtgcaccatagttggttaaaacgatctcacacccgtatgccgccgcttccaaagcgaccattccaacaccttcttgaagtgatggtaatgcaaaaactctagcacgcttatataagtcccaaagttcctgctccgatacctcacctacatattctatattttcagcattacctataagttttttaagccagtcttgttctgatgctccatgaagataacctgctaatttcaaattaaaaccatatctctttgcagcttcaataagtagcggaacatttttattagcagaagccaaacgactaacgtggaaacaaaatttttctttgaagggcatttctgtgatgggtggaatacgaaaatgtaaaggaatcttctttattatctcctgtgggcgttccagacagtaattagtataatgacgttcttcttcagaacgaactaaccaaagtttgaagcaatctttagacaaccataaatcatggaatcgtgatgttaatcctaaatatttttgatttccccaccacttacaataaaatttataacgccaagctggtatgttaggatcaataatgggagccataattaagttagtattatttttaaataaatctttaattaaaactcttaatcctaatgagaaacttactacaataatcgcatcaaaacttttccagtcatttctatcccaaaagtttattaacgagacttcgtgtcccagatttcttaaaccttccgcccacattttacactgaaccattacaccactgttatttgttatagcgtatgttggttgtattattccatatttcatattaccatatttttttactacaatctatttacgaattattaatcgaattacgccaaataatatcacatacaataaaatgtcttgtattccatttcttagaatcagatttagacttctaaagatgccggtagaattattaaagtaagtcatatacttaactaaagcaattattatgggaataggaataataaactgtatcctcgtagaaaccaacgaagaaaaaaagtagaaaactaatacgtatataaaaaatgcgaaaatgtaataagaatatcccatccaataaagccctacacctgaatcccctgctacacgaaatcctttatacatatttttaagacctagcccctctgtagacagtaaatcaccaggtgtataattgttctcaaatttattagttttatacccgaaaatatccaaaataggtgtaggtatttgaaacataaagaaattctcagcatatttatgcattttcggattgtcataacccaatttagtggcataatcgagtgtcaagtcttgagttcgaagattacatattctatctaataaaatattatctacataatattcactccaagcatagaaattatctcctccattgtctgaattagacaaagatgccatattataagcagtgtgtaatttctctttatctgagtaaagttcccaaatattagaaagcgtttcccctgctttgcttgaatatgccgattgcctattcaagatcatagctgtagccatatctgcaactggtcctgttgccaaatataatccaagaattatcaatatatttgttttggctttaaacagtcttttattttcaagcaagactaccaaaaaagtcatcagcccccatgaaacaataccagtaaacattaatgttcttttggtagtaacaattgctaaaaaaacgataaaagaaaaataaagaatcaatgaagtacgaggaatatcgttgtttttcctcccataatatttaggaaaaagcatagctataggaagtattgcaaatgtcgttatttggctcatcatctgaccaaaagcacccttattctcagcttccatcatgtccgttccttgaatagtaatattgtatagcagggcaagaatccccacaccagccatagtccatatttgagcttctgttggagctttaaaataccccagctttttccatatacctaaaagccatccttctttgtatattcgtcgacaagtatgaaacgccaacacaatagttgttacattaagcatcaaattgagaaatgtaatatatggtacattaaaacggaaagttacgggtttaccttctatcaatgtcacacctaatggtaaggcaaagaagcaaatgccataaaagaaaatcgtaacaaatggtataaaatattgatataaaaaatctattttcaaaaccgttcggcttataagcatccacccatataatagtactacacaaccaaaaagattttctagagcgggaaaagctatacattcaataactatacaaaatagcatatatatagtgatagctttctttataattccaagagtattgtaacttttcatttttaatattcaaaagattctgaatatacttatttgacagacaaggactcgattatatcctccatcattttttcatatttttcatatcttgcttctgtaattgtaacgacctgtttaattggatattcattgagtctcttaactatttcatcaacagtaacattacatacattattttctatttgagtccaattattttctaacccatattgttttaaaatatcgaatactttgctactagcattgttttccttttttccccagaaatctgtacttccccaattatccaaactataacaaggaacaccattggccaaactagatacgatagggtgcatattacttccgatatatcctgccgaatatttaatcaacgcataccaatcaagtggagatagtggtatagaaatcgaatgtttaaaaggatgactaaatgccattgctccatctatcggaaaagcaacgcactctttaccatccattctcatagcatcatttaaacttttaagaaaaggcatcgacaaggtctgagcgcgcattcctatcaatacatatttatcgggaagaataaaacgcttacgaatatcctcttcggaaggtattttttcccccacattttgattgagagcaaaaactgggtccggagtaatgtcaatcgaaagttccgaatctgcagcaagcatcatgtttttagtccaagcatcccgcaccgaaatatatttcaacctattcaaactttggctcatacgcttaagcatatatttactaaatttctgatatttgctattctgtgatgacacagacatcatgaccgtaggtacattatcagaaaaaccatatccccaaaaaggattggggtaacgacgttctgaaggcaatggttctatccagtacggacgacgcttacccaattttaatgttgaaaataatggccaatgctgcaccacagcatcagaacctattaccacagcgtcaatactatttttttttatagcgtttttcacttgattagcattaagcaaatgtaatacctgttttttcagattattatctataaacttcagatgttccgtcaactgaaggtgactacgtttcgttttaataagacttttgtaacgtgaaattagcctcaaccatctagtctgaggagatatatattccagaaatattacttcatgcccatgtttacaaaaataactataggtagatagtgcctgcaaattagctccaaaatttgctacacgataaaatgtcaacacaccaattctcattattatctacttctaatgactttttttactttctcaaatccttctttcccagctgtactgataatcaacttctttgcaaaactttccacaatcttatccgcagatttttccaaattccttactatgcgtaaagcttcattttcgtcatcctgttctgtaaacacttcaaaaatcataggcttatctgtaatttcaggaataagaaaacgctccatatttttattaaaatcatccttattagaggcagtcatatattcatatccaagattctcagaataatgccgcactaacgatattgatttctgtccaaaatgcccccctcctgccatatattgatctaccattgtatcgctaaagcgtgataccggatgagtgtaattccgaaattccataccttttccattatttacaagcaatattctgacattgtttccaacatgtctgttacctagtacattcatatcatagaaaaatgccaagtcacctacaataccaaaatacaatctatttttatcgcatagtgaagcaccaattagcgcagaaatattaccatcaattccaaatccacctacattactatatcctctgaccgtatggggtgtttcaaagaaattccatgcgcgtaatgaattcaagatagcataatgcattacactatctttcggtatatgtggtgctaatgaatacgccaaccaaatattcgaaaatggcatatctgccggtatctgtgaatagagatgattgtagtcctgcttacattccttataaaaggataattctttttcttttgtctgtttttcaatataatgactaaagaactctacttcatgcatataaaacatctttgacaggttatgcgaaggatcacgaataataccatcttcgcttacacgccaaacggtctttgctttgggcataagtagaactgattcataagcaccacaaatgtcaccaatataaatgagtaaatccatgttacaaacgacgctcttaaacttatcttgacatcctaacaaggaagacattattctgtactttcctcgataattactcgtttgatcacaatacaccactccattgttgttctcacagaaagcatctattgctgtggtaagttcttccgtaaaagctatatgtgatcctataaaaattgcaatacgtcccttgggtaacgcaggaaaagtatcacgtatcgtaatatattgtatagcatgtacaccttttattgtccgtacagaaaagtcaaaactactattcgtttccaaattgatatgtacaggaccacctccgtctttctttaaagcaattaacgctctgttcactttcaattggcagtcccattcatcattgctatctttcacaagaggagcaaaaacactaagttttacaatatcatttggaactattgtacggtcaataacttgagctacatggttacctatgcatgacaatggtcgtgttgaagtcaaggccagaatcggaagcctacgataaaaagcttctgttaaaccagaaaaatagttgcgggatgcagtagcaccagtacaagtcagtacaacaggttcacctgactctgcagaaagtccacaggccatatacgctgccgaacgttcatcaacacatgaatacatttcaaaataggaatcattctgggcgctgtacacaaaaggtatattgctagaacctgggcttgctacaattttttttatattataagcttttagcaaagcaataacaatctgtacattacgctctatggagtaatactctttcatattttctgatatttagattgatttttatttatttcttggcatcactgttcttcggagcaaatactttatataatctttcattgtagagatttcattaatcggtgcccattctccagtcattctatcatatacagcctgcatgccccattcgatatttctaaattgaggattactaagaaaagattcgagacaagatataagccctttttttgtcagcacaaactgcgatgtatctatatattgttttattttactattgtcaaaacgtctgttataatatctatccaccacaacctgccattttgcacccgcccattctaaacgtggacttttatcaagtaacagcaatttagggcgcaccccaattctcttttctacagtatcaagataaagttccaatatttccttccatgtatgactttcatctgatgttatatggaatgcctcccctaatgctgtttctttaccgattattgatgctattcccaatgctacatcatacccatatgtaagcgtagtacttttttctgcgatatcctttgaaaaaacgattgttcgtccattcaaagcacgataaagccataattctttttctaacacacctaattgcaaacgaatttcactatatgtaatatacggacgaataactgtccaattattttttccagatctgtgaagaatatcttcttgccgcgccttactaagagcatattcatctgttttgagatattcttcttctttatatacatctaaaagacgcggagaattttccgttataggagtttgcgaatcggcataaactctggaactcgacaaaaaaatatattgtcctacggaagataacagcaaatccactctatctgcaaactctgatgtattataaatcataaaatcaataagtacatcaaaatgatacttttgcaaaatatcacttaagaaagcgttttcatgtgcattaccctgtatataagtaattcccatacctttacgttctctacgtgtagtcacatacacatcctccccttgattattcaatatcttcgaaagatgtactcccatcgccccagttccgcccaataataaaatttttaatctttgattattcatgaaatgccatttttcacatttaaaatcatatattccgttttaagatttttgctaaaattacattcttatgaaaacctctgtacgattttctttaacttggacgtaatagtaactttctcgctctgtgtgagacctattgtataaacaacggtagatgttacaagcaaactgcacaaacaaacaacagataatctaatccaaccactgtctaaaacaaaaagtaatggtaatgggattataaatgttaataacataacaccagctacacgtcccaatacatctctaaagaaataactcaatggcatatataatagtactttcataaaatacaaacgaaccagcaatgctatacaataaataattatgtatacaatataagtagattcaggaccacaaccaaattcaaaacataaccatgaaaaaggaaaaaccataactccgacaattgctatgactatctgatagccttttatcttaccagtcgccataatagcagtccaaaatgaatttcctaataaagaatctacaaatgaagaaaacactatcagccttacaaacacaatcgtatattctggaacagttttaagccaaattttcagtattgtcggtgtttcaagcacaataggcaccgcaataaacagaaatagaaatgcactaaactttgctccacgacaaaccaattggtacatataatctaattctcccgcagaataagatttcgttatctgaggattaattgctgtagtaaaactattggcgaaagattttactgccgaatcaacttgtacggcaataccacgagctgcgtttgctgccacaccgaaataaatattcatcagcatatttacgccttgcgtgttcagcataaaagctgatgaacctagaaagttccaaccagcaaatttacccatttcggaaaacaagtctttatcaagaagtaaataataggtacattcttcaaacttacgcctgcaataaataccatatattatacgaataataaatgcaacaaccaaatataataccgcatatgttttcaacttgtctaatggcgacaagtacagcatatatgcaataattaactgcagaactgcattaacaatactaatcacagcataagcccccatttcttcgtgagctataatctcagcattgaatggaacacttatcaagtttaaaacaaaagcgccaatagcacattgtaacacccaatgagcagcattcaatctgtcatcaggaatactcatgtgataattcaaaaaccacagacctataatttctgccgcaataacaattaccacagacattatcaactgaatattaacgcctgtacaaaatacagcatttaacctttgagaatctttcttacctaactcaaaagttataaaacgcgtaattgcattagaaaagctaccacttagtacagtaaacattgctataaatccaccaacaacattgtaaataccaaaatcactaattccaagtgcatttaacaccacacgactcgtaaacaacgccactgccattgtaaacatcatacggatatatagcaataatgtattcttagctattcgcttattattactagaatgttctgtcattattatttggtactaatctaatgtatggtataagttttggctatctcccccattatgaaatatcacatcaatagcacgcgcatgatcgatgacgtacaaccaatcacatacattttctcttttgccatatacaggttaatcattaaaactgaagtttgcatctatataattattttaattatgcttatcagaacaattataggttataaacaactcatttttaattcattaatgactttaagcaagtattgcccatactgattcttcagcataggcttggccagctcacgcatcttatcagcagtaatccatccatgacgtaaggcaataccttctaaacaagcgactttcaagccttgacgtttctctataacttcaataaaagtactggcttcggataaagaatcatgggttcctgtatccaaccaagcgaatccacggccaagtagctgcactttaagttcctgatcattcaggaattgctgattcactgtcgtaatctctaattcaccacgcgaagatggtgtgatatttttagctacttccaccactttattaggatagaaataaagaccgactactgcataattagattttggctgaataggtttttcttctatactcagaacattccccattttatcaaattcagcaacaccataacgttcaggatcggcaacccagtatccaaaaacagtagctttattcccttcttctgcagtatacacagcttcttgcagcatacgggtgaaaccctgaccatagaaaatattatcacctagtaccagacaaacagaatcgttaccgataaattcttctccgataataaatgcttgagccaatccatccggagaaggttgctctgcatattcaaaacgtacaccataatcagagccatctcctaaaagacgtttaaagcccggaagatcataaggagtagaaattatcagaatctcacgtataccagccaacatcaataccgaaataggataataaatcattggcttatcaaagatagggagcagttgtttgctcactccttttgtgatcggatacaaacgagtacctgaaccaccggctaaaacaattcctttcattgatttgttattagtactcaagatttgagtggcagggtatatatccttccactcaaaaaaatgaatattttattaaataaatagattaccttccgagattaaaaaaacagttctaaaggtcaaacatgaagtgtccgacaacaaggtgttgagcagatgatcgtaatgttatgattagttgattttttcgcaataccacttgggaatatgtagcatgacgccgatagtagctaacgtaacaactacgtaatagctcttcttgtattgcgtgagtttgccttcaagtccggcaaacgggccacggatcacccgaactgcttgtccgggacgggcttctgctgttactgtatcgacataaagagttcctttataattaggatcgcatacggcacggaattccaacatctcacagtctggaatctcataacaccgccgtgtactccggtcacgaacaagcaaaaaaggtatagtacaatcttttaccctttctaaaagttctttttccgtaaattctttctcgataaacagcagattgtgtacagctggagtcagtttccgatgctttttaccatcaagcgtctcatgctcgatatatcgcatcggaataaaataatttaccccttttttttccaaatatttccccaaatgttcttctttacaatagaaggtttgtacagcataccatgccttccttccctctgtttgtcgttctttgtccaaatcattcattatcacccattaccccttgttttttatttcatcacttacttaaaagacaaaagcaccctgactttcacaaatgaaatccatttatgaagcagtagcgcatctcttaaggatttagcctttttatcttatctccatataagaaccaaggttcatagagaaacggatacagtactaaaacgatgcaaaagtaatacaatttaataaaagaacatacttttacagcttttattttgcctgcaaagatgttaaactcctgcctgcttaaacaaaaattcctctaagtgtatcgcaatgaaacacttagaggaattacacatattacaacgatatttcttacttcttagcttcctgacggctttcaatgattaagactccttttttcaagcctttacccgtagcttcaagggttattttgcctggctgctctgtcgaagatacaatagcagtcatcataccactgaagactttcatcttcggacgctggaaagattccaaggaagctgcattaccattagctcctgcacggtaactaccctctcccttcactttgaaactgatttcatgtgaggcatccggacacaaattaccgtctctatctaccactcgcactgtcacaaaagatagatcttttccatccgccttgattacattacgatcagctaccaattcaatatgatccggtttaccggctgtatggagttctttttcagctacagctttcccgtcagcattataagccacgactttcaccgtgcctggctcatattttgtatccatccacattaggcggtaacggctctgacgtttcaagttcatgatggaaacagagtcagcactattatcaatggttacggaaaggtctttggtacgtttcccttggctctttccgttgatgaataattcggctgaaggatagttggtatatacaaagacaggagttatctctccctctcgtccttcccaattccagtgaggaagaatgtgaagtgtttcctgttctttattccagtgactacgatagagataataacggtctttgggcagccctgctaaatcgataattccaaatagtgaagaatgactgggccaatctgtataatagggagtcggttcacccagataatcgaatcctgtccaaacaaactctcctatgcaataaggtaagtcctcatgctgaataaaatcatcctcaggcagattggaccatgaacaagactccacatcataagaggaagactgatgatcgtcatatttcttcatccattgccgggtaacagggaatttatatactccacgcgaactaaccgtagaagcagtctcactacccaagactatctgttgaggaagttttttataattctcctgatatttatgtggcctataattaaatcccgcaatatccattactgccgccatattattattgactacagcatccggcgcatccatcccctgtgtgacaggacgtgtcggatcttcacgatgacaaagttcctgtagaaaataagacatcttaggtcctttatttccatcccattgttcgggaacctcatttccgatgcaccacatcaccacactcggattattacgataatgacgtagcaagttcgtcaaatcctttactgcccattcgtcaaaaacatgacgatagccgttcttaaccttcatagccttccattcatcaaacgattccgccatcaccatcattcccatctcatcacaagctctgattaactcaggagcaggcatattatgagaagtacgaatcgcattacaacccatatctttcaaaatacgaatctgacgacgaatagcagcatcattcacagcgcctcccaaggggccgagatcatgatgattgcatacgcctttgaatgaagttctctttccatttaagaaaaagcccttattgggaatgacctcaatagtacgaataccgaaagatgttgtatattcatccttcagtatattgccttcatagactttagagacagcctgataaagaacaggagtttccgggctccataaagccggacgactaacaacaagttcctggctgaagatattatcatcaaaacgggaaccttgtttttcatcagtagttactacttttccatccttatctttaagttcagtcactatacggtatgcatcaaactgttttccggaaggtacgaccaaagtcgtttttatattcactttcgcataatcatccttcactaccggagtagttaactgtgtaccccatgtcggaatatgagcatcttccgttactaccagatgtacatttctgtaaagtccggctcccggataccaacgggaagattctgtctcattctccagacgaacagctaaagtattctttgtcccctctttcagatagggagttacatccagataaaaggtattgtatccataaggccaataaccagcctcctgaccgttaatatacacacgagcatggctcatagctccgtcaaaaatcaatgtagcctttttccctttgacaaaagagggagcatcaaaattcagccgataccaacccactccgacgaaaggaagaccacctgtacgtccggcatgttccatcgcttctttttgtccgtcttgcgcaatggctgtcaattgcctgtcattatctataccaaaaggtccataaatagcccagtcatggggtactaccacagattgccacttgatatcattatagtcaggctgaataaaatcagcattatcttcacgtgtaaacttccaccctttctcaaaagtatacgaggttcgtacttgtgcactgatcacagagaaagaaaaaaggagggctattcctaataagtatctaatatttatagtcataaattatacatctgattatttcactactatttcatctgtaaatatccatccgccaaactcttctccggcacgagcctgataacgtatataccgtccttcagcactgccttcccatgaaatactaataaatttaatagcttcttttctatttacttcaaaagtatattgtttcaattctgtgaagtttgctccatcatcagaaatggaaatagtgacagattcaggcaaaaagacctctgcccctaccacttgcataaaatcagcagagacagaatggacagcagtttccgtacccatatcaatggtaacatccaatcgctttttatcgataaaaccttgccaggatccatctccataagtccagtcgccacgaataccatcagtaagagctgtatttccctgcgcaggatagtgaggactatacggagcattataaatcacctttttccccacagccaaatgacttatcggcttcaaagactccggacgacttcctatctcatttttaagatcaaaagtatgatatcctttcgcttgcaaatcatcaactgctttcaatgcacgattatgaaagtctgtccatgatttacgttcgggagccgaccaagccacttctgccaaagcaaggatacgaggatatatcatatattccatatgctccggagtggggatatattctgcccatagatttgcctgcacaccataaacaagttttgcctgttctacagttaaagaatctgaaaccggattatatgaataaaccttctccaatggcaaatatcctccgatggcttccggctgagaatacggagcatcctgataactatccaaataacaatattgaccgggagtcataattgcctgatgaccggaacggacagcagcaatacctccctcttcgccacgccatgacattacagtagcattaggagccagaccaccttgaagaatttcatcccaacccagcaacttacgcccatgtgcattcagaaacagttcaatacgatggatcagatagctttgtagctcgtctacattagaaagatgttcatcctgcatccttttctgacatttcggacaagtcttccaagccgccttaccagcctcatcgcctcctacatgaatatattccgatggaaaaagctccattacttcagtaagcacattttctaagaaagtgaatgtttcttcatttccaacacaaaaatctgcgtttttataaggttcacccgaacaggagagttgcggataagcagccaatacttcttctgaatgagcaggcatctcgatttcaggaataattgtgatataatgctgctgcgcatatgcaataatctccttcatgtcatcctgagtataataaccaccggaagcaccgggctcatcaaaacggagatatttccgtccgccattccaccacttcttccagttggcatcagtacgccaggcggcaaattccgtcaataaaggatatttctttatttcaagtctccatcctgccgcatccgtcaaatgcaaatgcaaacggtttagtttataaaatgccaatgcgtctatctgtttcttcacaaattctttagagaagaagtggcgggagacatccagcatcatcccacgataagcaaaacgaggggtatcctgtacttcaacagaaactatagaataacccgtgcccgaaggctgagataattgcaacagtgtctgaattccataaaacaacccagcaccggaagaagcctgaatcagaatatgtttaggagtaacggataatatataactttccggtgacaccaactgaggattcttttctgttatcaataaagacaagacattctgtttatctttctttttcccttccttaaattgtacaggtaatgcagttttcagatagtcgcccagaagaatagcttcttctccttgtaagtttgtataaagctttgttttttcagagagtaaaaaagagcccgtaccctgttccatctttaagggaacaggaattacggactgtgcattaatgggatgtgcacaaagacacatcccgattacccataagaaaagacaaactttagtgtatctctttcttatattcattaattaattgtgatttcgtctacaaataaaaagcctggataactcttaccaccatgccattccggaatacttttctcgggtgaagctataactttcacatattgtgcagttacaggtgtaaatgttagtttatggtcataaacaccatttttatcagtttccttcattgcaggataagcttcagatgccactttcgtgaagtttgtgccgtcttctgaaacttctacagagagtcctcttgtatcaaaaacccaatctcccttctctacgcaagtagaaatggcaacgcttgaaatctctgttggttgtttgagatcaatagtcacatccatatcatttcctctaaatgcaatccagcgtccggttttatagttaccatttcctttcaagccatctaccaacgtagagacacctttgaactcatattgtttattcaccggctgattagcaacaatcggcttcatgcttgatttactgaaatcgattttctcagaaacgacacgactatttccagtagggcgaatagctatagccgagaagtctgcattttccttaatcttcaaagcgccatcataaacgggagaagtactagtcggctctgtaccatctagcgtgtagtggattggcgcattgtcaattgtagtaagtgtaatgtctaaagtaccatcagccggattcggagtaaattctgcttttacgtcaaatacgtgctttgcataattatatccttctgcatcataccacttaatcagtcgtggaagacgagataagaaatcttcgtagttcttcttatcaggtgttgaccactggacttcacacaaagcagcccaacgaggcaagaccatatattgagcatgagagaaagtagcaatatattctgtccagagattagcctgtacaccttttatatactgctgttcttccggagtaagggaagccggcatcggctcatagctgtacaccctttccatcggcaaataacctccgataccgaaaggttcattctcagtatctttagcctgataataatcaaaatacagataagtgttcggggtcatgatcacatcatgtttctgcttggcagcttcaatacctccactttcgccacgccatgacataactgttgcattaggagcaagtccgccttcgagaatctcatcccaaccgataatctgacgtccgtgatcgttcaggaacttctctatatgattgataacgaaactctgcaaacgttcttccttactatgattcttatccgatttcaagcccaacgctttgatacgtgcctgacatttcggacatttctcccatcttaccttcggacattcgtcaccacctacatggatatactctgaagggaagatttcaatcaattcgccatatacatcttccaggaatttcagaacctgatcgttgccggcacaaagtacatcatcggctactccccattgtctccaaacttcatacggtccaccggtacaacccaattccggataagcggcaagggcagccagcatgtgtcccggaaggtcaatctcaggaacaacagtgatataacgttctgcggcataatctacaatttccttagcctgttcctgtgtatagaatccaccatagggtgtattgtcatattcaccggagttacgtccgatgactgttcccgatctttgagaacctatttccgtcaacttcggatatttcttgatttccagacgccatccctgatcgtcagtgatatgccagtgcaaacggttcatgttgtgcaaagccagcatatcaatataagtcttcacttcatcaattgtgaagaaatgacgactaacatcgaaatgtgcaccacgataaccgaaacgaggagcatccttaatttcaacagcaggtaatgctacatcagcacccaaagcaataggcaatgatttacgcaaagtctgaataccatagaaaactccggcttctgtaggggcagttatcgtgacaccttgatcggtgactttcaactgataagattcagggttttctacttctgagcctaacgccagcactatagcatttttaccttcagttccggcttcaatcgaaaagtcttttccggttgcagtcttcagataatcagccaaaaattgcgcattacgctgcatcttctcatttccttccggataaaggattttcacaccgcttttcaaaataaaggggtttacttgcgatgttacaatttcttgtggcaatgggataatctgataattggcttcttcttgtaccgagccacaagagctcatcagtcctgccagtgccacacatcctgttaattttaggagttgtttcataaaataaaaattaggtgttagtagttaataaattagttttatttataggtttctcgaatatgcttgatattaacaggtaattcttctcccttctttatccggggagaagtgataattactttcttacgttctccgggtaagagatcaaagaagttgtcactgtaacgggctccttgcaatggagtctcaataaaaatatcttttgccaacattgatgaaaagagagtcaattcacatttaccatcggtctgcttcatttgataggatactgatgtcggaggaagttgcaaatctttcgtctttctgaaaaaatggacgctctcagccacctgatgtcccgatttatctttgagtatcaatttcaagaagctacgtcggcagtcttcgggagtcagccagccatccagttttgcacgataaacacattttgaagtatttgccggaacttccaacaaatgtacttgtatcttcttacccagcgtttttccatcaaaatccacgactttcatttccaatgtcatttgctccattgtatcaagccggtctgagatcagataaacactcaaactgtcattctgctgtataggattgatcaagaccggtgcaaaaacacgctttgcctgataatgtaatgccttccaattaccataataatcaatacttgaccaggatactaccggccaactgtcgttcaactgccaatacaatgtccccatacaataaggacgattgcgtctgtgagcttctaatccatgccgcatcccctgtccttgcaagactaatccgacatacacaaaatcctcgaaactttcgggaatgatataatcacgttccatataagtacggatcaacgaattaccaatactactcttctgatgcgcattcatcacttcagactcaatctgataatcttcaggagcagcaaaagcagcaatggttttcatttccggaaatgactggaaaccaaattcactcataaaacgcggcaaatcggtatctaaagactcaaatggcttctttccgtaccagactccccaattatgactgtctcctgtcccccatgactccggacgcccccagttagcgagataaggcgaactgtgcacataaaaacgatccgaatcaaattctttaaccgttgaaggcaacagctcacggaacagtttatcataaccatgcattaatccttgataaacctccggagtaaacttcttctcaaaaccccaatatttcagagcttccagtatttcattattaccacaccacatcgccaaagaggcatgattccgaagacggcgaatattgtaaacagcctccgcctctacccgtttcaggaaagtaggatcggatggataaggagtacacgcaaacataaaatcctgccagacaagtatcccgttctcatcggcaaggtcatagaaaagattattctcatatgtcccaccgccccatatacgaaccatattcatattggcctccttcatgtcacggaacaaagtctgatagcgttccgtagtaacattaggcagcagtgcatcctgaggaatataattagctcctttggcaaacatcggtatgccattgacttcaaaataaaaagattctccgtccttatctttttcatttaccacacgaatcgttcgtaaaccaatccgatgagattgttccgcaacaatccgatctccacaagctatctgagccgagaaatcatacagagtcggagttccccaaccatttggcatccatcgtacagggttcgtcacttcagcaggaagagtgatatgatttatcccgggttgcagggtcacctgctgttttacttctgtaacggtagttccattcaacgatacattgacccttacttcagccggaattttctgaggaacgatctggtttacaatcagttcattagacagacgagcgttttcatctgtcagcgataattgtctgacatggtagtcagatatggtagctatgtcgtaaaaacgaagagtaaccgggcgccagacaccacttgtcaccattcggatgccccagtcccaaccgtaactatacggagccttacggctgaacacactaagatgtttctcgtgatgatcgttatccgccggataattgaagccattggaagcatattgtggcaacgtttgccgaataggtgaatggaaataaatatataagtgattctcgcccttccgcaacacagattttacaggaagtgtataccccacaaacatattatcagccttcagcagtaatgagccgttgagatatacgtctgcataggtatcaagaccttcaaaaataagttgggttccgtcacgattcaattgctcttcggagactataaaggaggttctatattcccagtcctcattctccacccattgaattttcttttcattcatcccataaaaaggattcggcagtaattcatgactgatcaggtcctgatgaaccgtaccaggaaccgtggctcgcatccacttttcagtccctgattgagaaaattcccaaccggtatccagtagcatgacttccgaagtgtcattaccttgagcataaaccatactacagcaacatagcaatccacatgctatcggggctatctttcctgtcaaatttaagatcatagtgggggcattagatattaacggagtaaagatattgcttttttgttaaatatttcctattgaagctacaaaatatctcatttcatcgaaaattcggcacgaaatgtcgaagcaggcagtccttcccgattgatcagattagcccgcgtaaaaggttgccagccataacgtacatagcggggatttggcacttctttactatacaccttcacctggtctcctacaacctcagccgttgccggataatagataccatcatattccgctacttcaaagcattgtaaaggctttccgtctgaactccgcatcccttttccataatcaaaagataaaaagactttcccaccgcgaacgtttgcaccacgaaataaaggaccggaaggaatgacatttttctgatacgttttattcaaagcccctcgcgccaaacgctctcccacaggtttcttacagataggatgcacatccagagaatcaccatgatcgctggatacagccattccgatatgagaaatttcattcaacattctacgctgactatcacggaaccaaggccaggaagggcgattcaaactggataattgtacataataaaaaggcaggcaggcatcattccaattcttccgccaactattcacgagcagtttaaataatttttcatgagcttcccaattatgtgcattcgattctccctgataccagattactcctcgtatcggatactgttccaaaggccgaatccccgactcatataaataacaaggctcatacggatgcctctgctggctatttgctgacttttttatattcaaagcagcccgtccgcgcacccattcctgaataaaatcatttttagtccagtcttttaaaatggcgggaaactgatattccaaactagctctatctacccaggcttctgtaggtgatcctccaacggcattgcaaatcaatccaaccggaacattcagactatctcttagcatcttaccaaaatagtatgcaattgccgagaaatcagaagctgtcgccggagtacaatttttccattccgtatccttataatattggagatgattcaacgaatcaagtacgttcgcctcccattcgacggcatttgtgcgccaacgtgctttcatatcatacaaacgaagttgctgatctacggcacgtggaatatcggctcgggcagtcgaagcctgtttcagcataaactccatatttgactgaccagaacaaagccagacttcacccgctaacacactttgatattgaaaacccgtctcatccgttgagatctttaaggtataaggaccacccgcctttaaaggaggcagcgttaccgaccattttccattcagacctgcttttgttttcatttgccggtcggctatgcttacagtaacccggtccccggcattggcaattccttgaaccgtcaacggaacatcccgttgcaataccatattgtctgtataaagcaacgacattttcagtccgccataatctccggtaatggcggaatatacggtctgagccataataaacgctccttcgggatcagggtgtacggcgtccgtcaatatgaaagggtatggatacaacggctcatgaaagtcgatcaactgtactccggtatagcgtgccacattctcaatagccaattgtatttctccatgccagtcacgtgtccctgacaggaaacgaggatgccgattggcaataggcgtaagtctggcaatcataatccggactttagaattagccgcccgaaaagaatcgatcaattcaatgtaatctttcacaaagaaatcacgataatcgggccaatcacggggatctgtatcattgatgcccaaatgaataaccacaatatctccgccaaagtcgatcgctctgcgatactcatcttgctgcatataaggccggtgccctttattcaacaaggtagcacccgatttgccgaagttttcgacttgataagactctcccaacatcttctgtaattgcgccggatacgattgtgtagtccggtcgggcaatccataaccataggtgatactattcccgatgcaggcaactttaatacgattttcctgtgcactcgctgttgtaataaacaagatggaaacaacaattaataatacatttttcatcatataaaagtcaattacattttcttttccggagaatagatcagcccttctacggccttatcaccgtcaggagtcacaaatactgcggtaaacatccatttaaccaatcgtacttcattcgttgagaatttgccgacaggcagtttcagcaataccttattccagcctttatgcaaatgaacccgtagtggcggacgtgccacacaattctcattacctaaggctgtttccgagcttttcacgagatgagtagcagaccataccgggggcagtatttcctgatcattaatccagatacggctttctttataatcccactttcccggcaatggcggcaggtcattctctgaacgtccataattctgaaattcagcccataagcctacttcctgtgttttagaagaatagacatacgtgtaagcataagcagtatgattctcctgtggatctttgtaaaaagccggcacaattttaccccatacgtgccgaagatagataccggctcctatggcagaacgcactccatattgcttccattcataggtatatgaatctttcagctcttcttccggtggaaaaactttagtcagatccccctcattcggaaaagcatctgtaatgttccattttacatgagtctgtttgacataggcaaatggataccctttaaacagatgctctttataccataacatacgactttcgaagtcctcaaaattacgaaagacctcagagttttcatctacaggaagaattgttccctgcttatcgaaatattcagttcctcctccccgccatgaacgctctgcgatagccagcatattcggataaaagttattttccagaaccatattccactctttgtcgattaaacgatcattccagatacccataatgactccggcaagatcatcacttcccatatctgcattataaatccgactattatatagagcaattatatcgccgaacgtatcaaaatgattcaaataatggaaacgggagtcaatagcgggaataccttgttgggctttgccacgataactccaaagctgcatcatatcgatctcacctgtcttatacttccatccgggattccaggaaatcacttttttccctttatcacggatataagccaccatttcgggcacaaactgcggattggtaaaatgcacttcatctgttccaatatggagatatggaacatcaaacgtttcacaaatctcatccagcaggagtttcaggattttcattccttccggactttgcatatcatgacggaaagtacggataaatgccgcactatgtccgggcatatcaatctccggaatcaacagtacctgatgagctttacagaacttggtcaactctctcgcttcctccaacgtgtaatatttacccgccatacgagtcatattcgcactatcattcaacatcggaaagattttactttccagacgccatgcctgattttccgtcaagtgccaatgaaaggtattgattttaaatcgggataatatggctatctcacgtttcaactcctccaaagacaagtagctacgccctacatcctgcatgaaaccccgaatcctgaaagccggccaatcagtgatagtaccacattgcagtcggattttctttcccttttcttcttttagctgatatagcgtttgcatcgcccaatatactccacgctctgctacagcctccacagtaattgcctttggagtaatagtcagacgataagcctcatcctgattgacaggtacattgccaaccgcatcaaccaattttatattgatagaggatgccgactgatcagtcagagtacctcccatttccgtcacaaactgcttccattcctgcgaaagcacaggagtggaaagctgcattttccccatgacaaaatatccttttgcaagcacacattgctgaggttggggaagcagacgcaaatgatctgcccccaatatatataaggtatggaataaaaatgcaatccccaaaaagattcgaagacttttcatcgaatcaaatctttcagttttacagcttgaaatgtcatgtgagctgcactactctcatacaagataccaatcgtttcccgatcaatcattgtcagacagctatatccccagccttctccttcatccagcattaactgatgttcgggaagccaggtcagcccatcgtccaggctagctttaatagttatatgattgcgtcctctggtcgtattcggattcgagaacaaaagaatatctttatcaagtacattatctttagcttccacatggatcaaactagccatacatacaggttcctgcaaggccttccgagaggaaggatgttctgtccatgtcttgcccagatcttttgtaattgccacagcacggcttcctccacggttatcccgcatattcagcatcagcactccgggctctatttctactacttgcgcttcggttgtattggtgcgtgccatgttgtgcatctgccatgtttttccgcggtctttactatacatgataccggcattagggacacgggtagagtcgataaactgagtagggaatactaaagttccatcactcattgttattccccgtcccggtccctgaagcaagaaataccaagaagggtcttttacttgttcggttatattaatcggtttcgaccaggttttaccgtcatccgtactttttgccatcaccagttgtgccgtttgatacagatccattccgggatgagaactccaccaggcacgttgattacccattccgtgtgtccatgcggcaacaacccaaattgtattcgtttgggtatctaccaaaatagaagggtcccctactccattctgtgcagcaggcaaaccatcgtattcaccgaacgaaagaggaaggcgcatcttttcccatgttttaccgccatccgtgcttcggctcaaaccgacatctacatattcctgcagatcgacactgctattataacggacatcatatacgccaagcagcgttcctttatttgaagttaccaatccgggaatacggaaagaagccgaaccgtcatcaccggcgtggcggacccccactgccattcgatgaataatgtctttcggtgaccgttcttcacaaatggcttctttaccatctatcttcactgattgaagttcggaacttattttagtgaaaagagaagtctccggcttcatctgcaagctgatccaaaagaaattaatccccgggaacaacttataatgactcttcaaaacaacttttgcagaaggctgcaagacttccgcacattttatcgaataagatggtattgctgccaatgtattccccggacggtgactggagatataatcaacaggtgcaaatctgttctttcctctatcttgtaaagcttccgtaccgccataatagagtttgacagcctgtacatccgacagattgacactccttccaaaatccaaaacgatctcatccatcatccggctttcttttgcatctaaacgaaagtagaacaatacgttatcctgccgctcaattaaaatgggaatttgcgtctgatgtacaaaaacggtgtctgaagctttcacaaagatagagcaccctaacaagagaataagggtaaataaataatgatttcttttcataaatgggggtattagttagtttaacgaaggcaaagataagattttctctgcatatatttaacagtcaaagcgacaaacttgcgttttttaccaagttctcgtaggactagtcaacactctgaccactgttcttgctcttgtaatcatcgacagggtcgggcgcaagcaactggtctattacggagtttcggggatggttgtctccctcctgctgatcggcatttacttcctcttcggtgattcctggggagtctccagcctcttcctgctcgttttcttcctgttctatgtattctgctgtgccgtctccatctgtgccgtggtgttcgtgctcctttcggagatgtaccccaccaaggtgcgcggactggcgatgtccattgcaggattcgccctgtggataggaacgtacctgatcggacagttacccccctggatgctccagaatctcacccccgccggaacattcttcctgttcgcagtcatgtgcgtgccgtatatgctcatcgtatggaaactcgtgccggagaccacaggaaagtcactggaagagattgaaagatactggacccggtcggaacagtagaagaaagaaaccttaataacttaacacttaaagatatatggattttaaaacactagccaatcaatatcggaatgaattattggataatgtccttccattctggctcgaacactctcaagatcttgagtttggcggttatttcacctgcttagaccgcaaaggaggagtttttgatacagataaattcatctggttgcagggacgtgaggtgtggatgttctccatgctttacaacaaggtggaaaaacgacaggaatggctggattgtgccgttcagggtggtgagttcttgaaaaaatatggacataatggagattacaactggtatttttcactcaatcgttcgggtagaccattagtagaaccatacaatattttctcatatacttttgccaccatggccttcgggcagttgagtcttgctaccggaagtcaggaatatgcagacatagcaaaaaaaacttttgaaatcatactctctaaagttgataatccgaaaggtaaatggaataagcttcatccagatacacgaaacttgaagaacttcgctctcccgatgatcctttgcaatctggctttggagatagaacatctgctggaccctgactacttaaaactaacaatggaaacctgcatccatgaagtgatgaatgtcttttatcgtccggagctgggtggtatcattgttgagaatgtcgatatggacggtaatctggttgattgcttcgaaggtcgtcaggtgacccccggtcatgctatcgaagcgatgtggtttatcatggatctgggcaaaaggctggaccgaccggagctcatacaacaagcaatgttaaccaccttaacaatgcttgattacggttgggacaagcaatgtggcggcatctattactttatggaccgtaacggttgtcctccccaacaattggagtgggatcagaaactttggtgggtgcacattgaatccttgatttcattattgaaaggttatcagctgaccggagataaaaaatgtctggaatggtttgagaaggtacatgactacacatggacacacttcaaagatccggaatatccggaatggttcggttatctgaatcggcagggagaagtattgctgccactcaaaggtgggaaatggaaaggctgctttcatgtaccaaggggattatttcaatgctggaaagtactggaagagttacgagaaacaaatgaaattatacatccatgaaaatcaaatatctaacatataatacattcttatttttattaccctgatatgaacagacaatacttctatataatacttacaatttttctttttacaagttgtagaaaggatactggatcaagtaacccagtattagaacagatgtgccagagattattttctcaacatgcagattcttttgaatttgaattactaaatgactcaaaccagatggatcgttttatactagaatcggcacacaagaaaattcgcataaaaggaaataataataattctttggccgtaggtcttaaccattatctgaaatattactgccatacgaatgtatcttggtatgcctctgatagcattgatatgcccgaagagttaccagtaattcctcaaccaatatctatccgttctaagtgtgacaatcgcttcttcttgaactactgtacatttggatatacaatgccttattggaaatggtctgattgggaaaggttgattgactggatggcattaaatggaattacgatgccattagctatcagtggacaagagacagtatggtataaggtctggagcaaattaggattaaacgatgaacaaatacgttcatatttcacaggacctgcgcacttgccctggcatcgtatgtctaatgtcgattattggcaaagtcccctgccgaaatcatggttggagcaacaagaagtattacagaaacaaatattaaagagggaacgcgactttaatatgacccctgttttacctgcattttctgggcacgtacctaaagaacttaaagcaatctatccagatgccaaaattcacgaaatgagtcaatggggaggatatgattcaaaatatcgcagtcattttatagaaccaatggactctctgttcaacatcattcaaaaaatgtatttggaagagcagacggcaatatatggcacagatcatatttatggaattgatccttttaatgaggttgattctccaaattggaatgaagatttcctggcaaaggtttctaagaagatatatgagtccatttatcaagtagatgctgaggctaagtggttgcaaatgacatggatgttttaccatgatcaaaagaaatggacacaacccagaatccgttctttcctggaggctgtgccagatgacaaactcatactgttggattactattgtgacagtacagaaatatggaggaatacggaaatgtactacggaaaaccatatatgtggtgctacttaggcaattttggtggaaactccatgatggtcggaaatctggatgatgttgatgtcaaaattgaaaaactctttgtagaaggtggtgagaatgtatatggcctaggagctaccttggaaggcttcgatgtgaatccttttatgtatgaatttgtatttgaccaggcatgggagtatccgttaacaactgatcaatggattcaaaactgggcaaaatgcagagggggaaatcaagatagacatattctgaaagcatgggattcattacataaaaaaatatataaaaagtatgcaacagcagggcaagccgttttaatgaatgcacgtccaatgttagtgggcacagatagttggaatacctatccggacatcacttacaacaatcgtgacttatgggatatttggacagaaatgttgaaagccagtcatataaacaatactggatatcgatttgatgtaataaatgtaggacggcaagtattaggaaatctcttttcctcgtttagagatcatttcactcaatgttattcagaaaaagacatagatggaatgaagaaatgggccgatcaaatggatgcactattgatagatacagaccgtctattatcctgtgaaaccaatttctcaatcggtaagtggattgacgatgcacgttcttttggaaaaacagaagctgaaaaagaatattatgaggaaaatgcacgttgtatcctgacagtatggggacaaaaggcaacccagttaaatgactatgcaaacaggggctggggtggattaacttacagttattatcgtgaacgttggaagcgctttacaacagaagtaataaccgcttcatcatccggccagaagtttgatgaaaaacaattttatcaatcaattactgacttcgaatatgagtggacattatccaaagagcaccatcctataatttctggagagaacccgatattgttggccaagacattatctgagaaatatatgcaatatttttattaagtacatacctcaaaataattataaattataaaacaaaacagcctatgaatataataccgaacttataattagggaaattatcaaatctaaagaagaaaaaaatacagaattacttaactttaaattattaatgtatgatgtcggacttacgaaaaaacattttttcaattaaaatctggactgttacgacattctgtttattatcactagtaaacatgaacgccagtaatactctcgctcattctttacaaaaagatgagatcaaagtagtaaaggacaatcctggcaagaaagtaacaggaaaagtcttggatgaatttggagaacctattcccagtgcatcaatattggtagaaggacgttcaaggggagttatcactgacttggacggaacatttgtgatagaagtcttgccaacagataaactagtcgtttcttttcttggaatggaaacgcagactattttggtgggtaagcaaacaaatatcgtagttaaaatgcaaccccaaacagcagaacttgacgaagttaccgtagtagcatatggtaaacagcgaaaagcaagcgttattggtgccatcaatacagtttcgatgaatgagctgaaaatgcctgttgctaaattgagttccggtttggccggacagttggctggtatagttgtcatgcagcgttcaggtgaaccgggtgcaggtgctgatttttggattcggggtatcaatactttcggtgcaggcaacaaacctttagtgctggttgatggagtagaacgtagtatggaccttgtagatgttgaggatatcgcttctttctctattctgaaagacgctaccgcaacagcattatatggagtgcgtggagccaatggtattgtacttatcacgacaaaacgtggaaccgaatcagcacctaagattaatgcacgcgtagaatatggttttaccaatccagtacgtatgcccgaattggctaatacggaacaatggatcaattattataatgatattactttggaatcatccggacgcttggctatacaacctgaagaaaaagcaaaatacctgaataatacagatccggatctttacccgaatgtagattggatgcaaacattgtttaaagacttctccaacaccacacgcgtgaatatcaacgttaccgggggatctcctaaaatacgttattatgtaggcggctccttttattcggaaggcagtgtattcaatatttcggataaagaccgctacgatgcttcaatgcgctataacaagtttagttttcgttcaaatattgatatcaatgtaacttcatctactgagctgagtctctcactgtccaatcaatatgagaccaagaaccgtccttatggttcactatcagatttgtatgcttatatgatccgtacttctccgatagctactcctactatttattcagatggcactttagctaaaccaagtacgggtaccaatccttataacagcctgaataactctgggtactcgcaggatttcttcaacaatgcgcaatcacttatttcgcttacacaggatttctcaaaaatggtaactccgggattaaaagccaatgttaagttctcatgggacgcctacaatgcgcatacactaaaccgcattgtaacaccatctacctactatgcaacaggacgtgatgaagaaggaaatcttgactttgtaaggagtactgaaggtagtgattatatgaaactcacacggacgaattcgggcacacgtactatcaactttgaagcctcagccaattacgaccgcctctttggagaaaagcaccgtgttggagccttgtttctttttagtatgcgtaactatacagacaatttcccgggtaattatgtagacgcttttgcccacaaaaacatcggtattgccggtagagctacttattcatattacgaccgttattttgctgaatttaacttcggatacaatggctctgagaatttcgcacctgacaaacgttttggtttctttccctcttttgctataggatatatgctaagcaacgaagctttctgggatccgttgcgttctactatccacctgttgaaaatcaaaggttcgtatggagaaataggtaatgaccagattggcggaaacagacgttttgcattcaactccaccatgaaagaaggacaatacggctatattttcggaacgaatcccggtagtggaagtatcgtaggtatttctacaggtattccgggaaacctgaatgtttcatgggagaaagctcaaaaagcgaatgtgggactggaacttggcttatttgaccagcttaaattccaacttgattatttttatgaaaagcgtaccggtatctatattcagcaagaaagtgttccttcaatcgtcggtctcaatgaaacccagtatgtgaatcttggagaaatgaagaatcaaggtttcgatggttctatggagtatgaacaacgatttaatgactggtatgtctctgcccgtgccaatttcacttacaatcgaaataaaaagttgtatgatgataaaccgactcctatatggccctaccaaagtgaagctggatttgcctatcgtcagcaacgcggtcttatagctctaggtctttttgagtcagaagaagatatagccaatagccccaaacaaaactttggaaacgttcgtcctggtgatattaaatataaagacatcaatggtgataacgttatcgacgcatacgataaggtagcgattggctatacggacgtaccggaaataaattatggatttggtattagtctgggctggaaaggatttgacgcttctctgtttatgcagggagtaggaaatgtgactcgtattatcggtggagacgctctttatggtgcctctgataatatagagcgtttaggacagatttacgcagatgtagccgaaaaacgttggacaaccagcaatcctaatgctacttatccacggctttctatgagcaaggtagagaataatcttcaaccctccacctactggcaacgtaatatgagttttcttcgtttgaaaaatgtggagataggatatacccttccgaagcatatttataaacgtctgggcatgtcatcaattcgtgtttatgcacagggtgtcaaccttttgacattcagcaaattcaaattgtgggatcccgaactcgattccaactatggaaatatatatcctcagatgagaacaatcaccttaggtcttaatcttaacttttaaagtatattagaactatgaataaaaagatacgaattttaggaatattcctatacttcaccgttgcattcagcttggtatcatgcaacgattatctggatgtgactttgctcgaccagcttacacaagacgaaacctttagtaagcgtgtctctaccgaacagtatttagcgcatgtttatagctacttgccacgggaatatgaatatctggaagaaggaagcgcagttccccgtagtgatgaagccatgttctcctggtatcagtgggtcaactacctctctttcaataatggatcatggggaccttctactccaaactataatatttggaaagcaaagtatacaggcataaaacaagctagtatattcatgaaccatgttgacgaatgtttggagattgactctgaaacgagacgtataatgaaagcagaagcacgttttctgcgagcttattattactttgaactattccgtcaatatggtcctgtgtatatctggggagacatcgaatcggatgaacttataaaaccggaaacgatagaccgtcatacagttgatgaaaacgtaaatttcatagctgaagaatatgataaggctattgcagaacttcctgcagagatcagcgatttcacaaaatgggcaggacgtatcaccaagggagcggcaatggctgccaaagcgcgtttaatgctctatgccgccagtccattgtataatggatgcgatctttataaaggacaaatgaagaatctgtatggtgatttcctttttccacaaagtcccgatcctcaaaaatgggaaaaagccgctaaagctgccaaagacgttatagatatgaacatctatgaattgtacaaagaccagactgaagcagaccctttactgcgtgccatcaaatcttatcaaggagttctttttgaagagtggaataaagaaacgatctggggtgcctggggacgtaatcctactaatactggactcggggctataggtttctatctgtatagccggtgcatgcctcctagagtttgtgaattgggtgtcggtggcttctgcccgtctctgaaattagtagatacttatccgatggctaaatccggaagatatcctgttaccggatatgataataacgggaatcctgtaattgataagcaatcgggatataccaataccggttttacagaaaattttaagcagccgggagccagttttgcacctggatttaaagcgcataatagctgcgtcggacgtgacgcccgtttttatgcttctgtatttccaaatggtttttattggatcaatcaatataaaggcataaaacaagttaccttttttacgggaggatcgtcctcgtacttagaatccggagattgtgtcaaagtcggatatctgtggagacgcccactcgatcctgctcttaatacagaaagtggcagttggggaaccgtattctggccctatttccgtttggccgaaatatatcttgactatgctgaagcttgcaatgagaagcccgaacgcaatgaaacggaagcattgaagtatattaaccttgttcgcgaacgttccggtttaaatgccctcgaaacagcgtatccggaagtgaaaggcaataaggatttgttgcggatgctgattcaaaaggaacgcatggtagaattagcctttgagggacaccgatattatgatgcccgtcgctggatgattgctcaacaagagtttcccggaccggaatattctcttaatttattggccacttcatacgaagattcttggtcgcggacatcaaatgtttggaaaggtggtccccgggtatttgagcctaagcattatttcttccctatcaatcaagaacaattgagtgaaatgaagaatattactcaaaattacggatggtaaatatatgtaatggatataaatatgaaaaaacataagacaatacaattcatagctgctgcactttttattgcatcggcatgtactgatgatcgtgataatctcatggttaatgatcaaatcggactattgcattctacctatacagaaacggaggtattccgtggtatggataccccctatcaattatttgttatcaaaagtgggaaaggaaagcaggaggcggaagtttccatttctgttgacgagactgtacttcagagttataatacggataacggaacatcgatccaattattgccttccgattgttataccattcttcagcctgctctgcgtctcagcgattccgactatcggaaagcttttgatattaaatggaatgccgaccgtctatccgatcttctttctacgggaaaggaatatggcttgcccatacaaatgagtgtggtgcaaaattttatctcagcagatgatgagagactaaaaaccattattgtacctactattaaggaaccttatttgcaaatggatgttcctggtatgagtccggttactgattttatgccgactttcggcgatttgaatgaaagagaactattcgtaaagataagaactaattattctaatgccgaagatgtttcatttcagattgaagtcgatcctcagttagtcactgattataataccgctcatggcacagcctataaaatgttgccggagagttcctttactgtagataataaaggagttatcttaacaggcatgaaggagacattcattaaaattaaataccacaagaaagggttaataccggaagagggtacttatttatttggtgactatatacttccactacgcattacttccgtttcaaaatatggtataagtcctgatgctgcgtccaaactgtacacagttaaattccaaccggacccaatagacaagaaaggatggagtgttatagatttcaacaactgttgtacccaagacggcggatggtatctgaatatgggatggggagtggaatcattgatagacaataatcctggcacacaatggctatgccgatgggatgtaaaagagcccttgccctattactttgtatttgacatggggaaagaatatacattattcagatttggatttgctaaccctgttgcaccagcagcacacgtttgggcaggcacatcgaaagccggttatgtagaagctagtattgataacgagaattgggttaaattaaaagactggacttctcccaaaatcggagaacccaacgttaatatggatgttcctgcgacacaagcccgatacattcgttttgtaataactgatacctatccgacttatgacgggctgagagttagtcttggtgaagtttatgcttggggtatgtaactaaaaacatgaaaattatgaactatttctcactatatctaaaaggattgatatgtttctgtctgttatttattactatggatagtcatgcgctatccatagataaaggatatagacagaataaaataaaagatctggcacttatttaccagggaggagtgcatcgtattgactggacttcggatcaatttctcccctatgtggtacatcagtttgcagatggacataaagactggttatttgacggattcttgtttttggagttcacagatgggaaaggctgtggctttgcaacacgctactcagataaaaatgcaagaaaaaaagaatggctatggttattagatcgtctttttgaagatggaaaagcgctgtctgccttagatcgatgtatcggaacacagattaaagaaatcggaaaaccggattttactcatcagatagtactatgtcttccggaagttcttcccggacaaaaagattggggagaagtggatggtgagccaatggacttttccagacaagaggatcaggtgaaggccacctgttggtatatcgatgagttaatgaagcgattcaaacaggcaaaatacaaacatctgaaattatccggtttctactggctggcagaggatattgatttcaccaaagatctgtcagttccattaagtaagtatattcattcgaagaacaaaacattttgttggattccgtattggcaggcaaaaggctacaaccaatggagggaattaggctttgatatcgcttatcaacaaccgaaccacttttttaaagcctctattcccgataaaagactggaagaagcatgtcaatctgccgccactctgaacatggggatggaacttgaatttgatgaaagagcattgtttgatgccaaggactcgttttataatcgtctggtagcgtatattgatcattttgaaagacaacaagccttccgtacatctgcaatggcctattatagtggcaatcatgcagttcttgatatgtataaatcaacaaacccgaaagatcatgaagtcatggacagactggctaatctgattgtatcaagacgtggcaagcaaaaaaaagaatctcatcagaccaaagttattgcccatcgtggattctggaatacacccggatctgcacagaactcgctagcggctttagtgaaagctgattcaataggttgttatggttcggaatttgatgtatggctgacagctgacgatgaattgatgttgaatcatgacggatggcatgaaggatactctctggagaaaacatcttctgacgtgctacgcactttaaagttaagcaatggagagaatatgccaactttagagcagttccttgataaagcgaagaaacttaaaatacatctgatactggaaatgaaacctctcagtactccggaacgtgaaacgaaagccgttgaaatgatcctaaagttggtggaagagaaaaaattgactcacagagtagaatacatctctttttcccgtcatgtgatgtgtgagtttatacgtctggcacctcctaaaactccaattttgtatttgggacaggatatttcgcccaaggaactgaaacaattgggagctaccggggcagattacaattattgggcttatcataaaaatccggattggttgaaagatctgaaaaattcagggatgacctccaatgtatggactgtaaatatcccttctgagatgcaatggtgtattgacaatggttttgatctgataaccacagatgcaccgacagctttcttaggcttataataatcatttggataatatgctgatggcaaattccatcagcatattatatttatactgtttatacggacaaaaataacaaaacaatgaaatcaataaatatcatagcaattatgccttttctggcatcatctttcatgacgcaagctcctgtttatcaagatgtgaatcaccccattggaaacagagtggtaggcgtatggaaaactaacagcaaacaagaaagtcatgtcagttgacgaaacaataactttcagtttagctgtcaagaacacagggaaccgtgaaagacaggaaattgttcagctttatatcagagacataaagtcttctcttccccgcccggtgaaagaattaaagagatttaagaaagtaaaattaatgccgggtgaagaaaaaatagtttctttgtctattgataaagaggcattaagcttttttgatgcggaaagacatgaatggatttgtgaaccgggcaaatttgaagctatcatagcagcatcagctatggatatcaaagatgttctcaaatttgaattaaaataaagatagaagccatgacgaaacgtttaatccttgcattcgtatttttatcctggcacttagtagcctgctcgaatggagattcgggaatttcttccggactcccggataagccttctgcagaagaagactctcccgggactgaaacgatatctgaagaaatgagagtgaaaataaccggcgaagatttatatatatcagccaagttagatgccaaaaccgatattctttattggttcaagaagtgtatgttcaatgaactgttcacattttatagagtaggaacaattgacaacaatatgcctgctcctgtcactctgcccgatgcttctccgacttctcttctgaatctggcttacagtgacaatatcggtccttttaatataaccggatacgggtggtgtggaggaaatcatccctatctggatgaagttactcaaactgcccgcaatatcggttatcgtatttacatagacggcaaagaaataaagacagatctatcgactctgacaaaagagataaagattgaagtaatcaatgaaataatgaacccttccaaagccgataccagtagtggaaaaacacttctgaatgagatcttatgtattgagactgtcaattattctatttatagaaataacattcaagtcttggttactcatgaatttcaaaatgagtctcccgtgacagtacaaatgtattacggaatgcaatctatgtttgacaaggagacacatacattaactgccaatggcaagtatgtggactggacagtacaaaaggatgtttctacctttacaaagaaagagtatccgtcatttcgccgtttcattgagaaaagcgcaaatgcgtatcaatcttcttatctgtttgccgacggattgggaaatcatgaagaaatatcagatgatgatattatattcataggaaattccagcaataagacgtaccacaagattatagctgatagagaacacaaaaagggggatattattcattggagcggagtgtatacctggtttaagtctcctgtttctgatgatgatgatttgctgtgttatgaaggtgttatagataataaaaaggtcctttttatagattgcaagaagagcgtcgacaggacaatacagttgcctgtcaattatactaagaagtcttttacgattatagagaaaagtaaatcaataacaattaccggtaataaagtaacagccaaaggacttaaaattgtatccgacgggtccggaagttgtgtgattacctttgattaatttagaaaacgatatgtggaaaaatgtgttagttctggttagcctctgtctgttgtttgaagatgtaaatgctcaaactacaaagaacagatactataaagctaatgatgaaaacgtttcttacgtgggacgtacggaaatacagagtgatggttctgtttctttcgactggaccggtacttatcttcgtacccgactttcgggaggagaattgtctatgaagatttcagatactggtattaattattacaatgtttttgtagacagccttttacacaaaacggtaaaagtatccggtaaagatactttgattaatttcatttccggcatggataaaggcctccatcatgtgttgattcaaaaacgtacggaaggggaatggggaaagacaaccattcatcaatttgtgcttcacaataaaggagaactgatgaaagaaactgagtgcccgtccagacatatcgaatttatcggtaactcgctgacgtgtggctatggtgtagaagggaaagaccgtagcgaaccttataaagctgaaacggagaattgcaacttatcttatgccactattatcgcccgctatttcaatgccgattatacgcttattgcacattccggacgtggagtagtccgcaattatggagattccgtccgaatatctgccgtgacaatgaaagaccgtatgctgaatacatttgatatgaatttggataagaaatgggactttaaaacatacaagcccgatttggtggttgttaatttaggaactaatgatttttccaccaatatatatccgttggaagatgagtttattcatgcttataagctactaataagccgtcttcgtgcaaattacggagatgtcccaatattatgcatcagtccggctattgctcaacggcagatcgttcaatacatggagcgtatgcgcaaagacttgaatgataagaaagtttatataacagttcttcccgaaggcctttgcgattcgactacagacttaggagcagtatggcatcccaattacaaaggtcaaatgaaaatggctatgtcattgattccttatatgtcaactatcacaggatggccattgaaaaaggaatcgttttattaagacttaccatgttatataattatcaaaatggcattttgtcattttgataattataaactctttaacgggcgtatttccatcactgcacaggatagagaataaaatgacagagatttgccgttacaggaaatcactttattgcgaatatacatctatatgcattctttttgcgttatttttcatgctattctgtaatatctttctttttttatattactttgcatcattctgattaatatttttcatcctaaaacaaagtctaataaataagatacccatcattttagagctaaaatgtgctccttttaaacggacttagcgttgcttttaaagcaatgggacgttcctttaaaagcaaccttatgtttatttacaatcaaccttatgttttagctcaatcaaccttatgtttatttcaaactatacggtgttttttatgcaaatgaccgctcgtttattcataatcatgcatattaattcaagattatatgcatatctctttctatcttgacccatctatcaaaagatagaaatagcaaaaatagggaaataaggaaattatgcttcctattttactatttatctatcattttgttttctgttcaacttatttttaatgcctgttattatactgtcggtatatctattgaatgatgtcaagttctccaaaaccacttgatcttagtaaaaaacatcgttaccaaaacagctaaagacgtaatgattactccctgaaggaacccaagccacgcattctgctggaagtaagacaacagcgaggcaactcccagtatattagccaacggcataatgaataaatcaccaaccacgtaagcaatcatcggattctgcccggacataacaagaaagcggctacttcgcacacatctgaaataatcacaaacaatacttaagaataagagcgcaaggaatgccagaccggaagttacaaagaaatagctaaaagtggcaggatctttcttgataccttcttgaaaaggttcaaaacatagccccaaaagaagaagatatgctccggcattaaacagctttttccataacaaagcgattccttctgtcggacgtaagaaaaccaatttgccaatcaataacagcacaagtgtcgctaataaattcactgtcaccatacgggtataaagcccatagagattgaatacaataatcaccatagtcaatatcagcagcgcaattcctatcttacggtattgcggtgaagccggctgttcggtatcctttcggcccttcatccattccatcaaatactcaccggcaatgctgccgggaattacaataaacagatatttcagataatcaaaccgatacatccagggcaaaggagtataattgaatatcacctgtgtccaggaaccttcgacagtacttcccaaaataacagccatcagcagcaataaaactcccaaacgcaaccatcggttatgcatcgtaaaaatgtagagggcagaaccgaagatggccatattggctaataacagaataatcacattactaaaatacaggctgaacgttcttccatcggcataagaagtagtaagcatcatgattaccgcaattccgtatgcggctatctttatgccggtatgtgcccagtccggcattttcaaaggaatgcgcatgaacatcggaaacagaaccgcaaagcaaagaatagccagcaaccaggctctgatgtcctgcggagaactcagcacataaggataaaaatgctgaatgaagatggcaaagaaagtcagttgtactccacgtttcaccgcttcatatactaatttcagtttagagtcacctttctctgcacgcttacctatggaaaaagggaaagctgctcccattgcaaacaggaagaaaggaaaaacaaggtctacccatgtaatgccgggcaaagaaggattgaatatatgatcgggtggcggcgtctgcgcatgactcatccaaccggggagcacctgcgttacgatggtagcagaaagtaccatcgtaataatcgcatatcctctcaaagcgtctaatgcataggcccggttattcataaggagcctcctcttttcattccttcctctacttctttccacagatttttggtaatgatatgtacgatgtcaaataccattaatccgtccgaacggcgaaggttcatctctatcgtttccgaaagtttggcggggttgtcatagaactggtccaccagaatacctcccataaatttattacctttcaatacctgacgtaaatgctgacatgagccttctacacaataccacgtaccggattgagcctgcgaatcagtttcgttccagatactccggttcgtttttctgtattcctcgatggttatgtccgtataataattaccggtagcataaaggtctatcagctcggcatagccataatttttatattcgggtgttgcccagctgaaatctttgcccggatcatattctttgctggcaaagtttacgcctacttcataataagatggataccaggcaccggtgtacgtgccgaaagaaacgtcagggttggctgccttgacttctttacgggcaagcgccatgaaatcagtaatgtttttagttcgccattccagccatttccggaaatattttcctggttgcgttgtgtatttcccatctgcatttttagtccaacggaaaatatcttcggggaagtttgcgacttttttacctatgtattcttcaaacttcttacgtgacaatgaagaaaaatcagcggttattccatcgtaacgtacccggtcgagcatcagaccgtccaggtcgggatatttggtcacgacttctttcagaacattcaggatatgggtacgatattcttcgttcaaaggattgatcatggcaccatatttatgcttctcttcggtgattggaatgattcctttatcgggagtgtacaccatcgaagcccattccggatgtccgctatataccattccacggtcaaaatagttgtgtccggcacagaatacattcaatgaggcgtgtatctccagccccagttcgtgcccttttttgataaagtatcccagatagtcaaaatcaccggctttggctcctttccattctttcatttgcggagcatattcacttttatataaaacttcccctgtgatcggacgaatgtcgacaaccgcatgtgtaaagcccagcgatttgattttttccaagtaataatcaatcgaatctttatgactgaagcgctcaaagtttgcttcggcatcaatccacattaaggccggtttctttttgataacgatccggaaaggagaagccggaagcccggcattattgcataattccccctgcatataattccggaagcagtagcggacttctgtcggggcactaacagaatcattccatactttcacagtagatgtgccattgatgacctccgcctttgcaggtcggaatataccatcggaacctacgatctcaaaacctttcacattctgattttccggagtcagtccttcctctccatattcaaagtctatttctacggcatttccctggatacgataggtcttgtagacaggaccggaatattggaatccttttcggccgtaagtctgggccagtgcccaataagctaaccgctctccaaccttaatcttataaggtgaatgtataaagagttcactgcctgcatctccggtggtcaccattcccactccgggaacttccttcatcagctccaactgacattgacggaaccatgcccaatccaacttgtcattcccttcggacttccagggagcaatctggacataataaaatggcatttcagcattatgaaagaaatttctccattgagaaaccatagcgggaaaaagctttttataaagagcaggatcgggagtattcgcctcgccctgataccagataactcctttgacagggaatcctttccacggatttaccattgcgttccacaacagagtaggcgtcccggcagcccattcgaatttatcctgatttgtatccggcaaggttacttcggaaaaatgagataaggtttctttgtccatccatgcttcaatctttgacatactccaggagcaatgtattaatcctacaggcacgtccaaggattgttgcaacagattgccgaagaaataagctgttgcactgaaatcggccacttcttccgaagatgcttcactccattgtccgtctattccttcttctttcggagtcgtgctccaattgttctttacggtgtaaagtcttaatggtcgtttaggattagcggacacgatatagggctgcgaaccatagaccggttgtccgcggaacccttttaccggcatttccatattcgactgtccggagcagaaccagacttcaccgatcaggatattttttaaggtcagctcttctccgtccgaaaaagtaatggtatatggtccgccggcttccggagtcggaagagccagtgtccattgtccgttccggtcacaatctgcatagattttccgatgattccatgaagcggaagcatatacacgttttccgggagtagcctttccacgaaaagtaacttctgcttgttgctgcaacaccatgttgtctccccaaatggaggtcagggttactttagcttctgttttcagaacaaagaacaaacttataagtagccaaaagtatctgtttctgaacatatgattttagtttatttgttttcaatagtttgagtatatacattaccaaaacggtcagtcaccttaatctctagccttgcgtttgggtcatgaggagttgcatgaaagagatgctcggtgagaaccggagatatccagtcatatttcaccttttccttatctgaacagatgacttttgccataggatcatatcctttgtacttttgcatttcgcccatcctttgtccattttcataccattctaccttccacagatcatcccagttccatacattggctatgatatcagaaggatattcatccgacgatcctgccggataagcatgaaactggtgttccagcggataacctgcgcttttataaatccacttcaattgatctccgttcacttcatatataccgtaacctctgggagttccgtctacattgatgtctgcacgccaccaagtgccacacactgctgccgtattatgctccatcaacgaatcattgaaacaaacgttcgtattgaaatgggtatgcccggaaatgatatgcgcattatagccctccaagagtttatatagtgcagctgtattcactgtttcatcctgatccaaagtattatatcttaactttttctgaaggctggagggaatgtgcatgaccacaaataccagcttatccctggacacatacgaaaggtctttttccagccatgcaaaagtccgttcatcaatatatccgatgtactggtagtcacgattgacatagaaacaattgtcgagtacaatgtaatgggcttttcctttattaaacgaatagtagatggggccgaaataactttcaaaagtacggtacgagtactcaaaagtacgtcctccgtaggtcatgtcatggttgccgatagcacgataaacgggaaagtccaaagtagatacggtattaatgtaagatggatacaaagagggggtatcacccacgatgtctccacaatcaataccgaatatgtctctttttcccgaataaggctgtacatattcttttatatcctgcaggaatctgccataggctttcacatcgtcttcggaagtgacttgcacatcagcctgcaccagaaacagatgattcgcatcattctgaggatttttcatcaactcaaaattatatccgtcttgtttatccatctctatttgttgatggaataagggaatggtcttttctgttttcggctgataaccggaaggcacggacaagtaaacaaaccgggcatccctttgaggagcaagcacatattcgcccgacttattagtcagaacacagtcgattccgtccgttacaactactccttgaagtcctttcccatgacaggttacctttccacgaatagtaccggataaattttgagcctgcaagttcaaactcaaactcatcaaaatgacaagttgtaataaatatattttcatagttatctattgttctttatacaaataaggcaattcattaacattaagtctgaaccttgcggctcagacttagtgctatgaatagaaaggagaatacttgtattgagtatattctcagattgaattatcaacttcctatttttgaacggactccagatagttatcaaatcctgtcttgaaagcgttccaatagtcgtacatcttgatatgacagaggtcgaatgcgaagaagccgtcgctattgtttatacatgcgtcgatggcatcaggtattttagcggcttgtccaccgttagtccatccggtaccattgcctatgtccggacctccggagaagggaacgtcacctttcagcaactcgcgaccgtttttgcaaaatccctccattgtccattcgccgctaccataaatcttatcgacagatgcataagcacctaagaatatataatccagatgatcggcataaccatagttcttataatctgctgttgcccatttaggatagtaggctgaggtgtcatatttaggacttgcccaatttactcccgaagtataataactggaataccatgcgcctacatacactccaaaattgatttctgaatttacggattttactttctcacgtgccttgacgataaagtcgtgaatcacttttacacgaaattccaaccatttcttgaaataggcaggctgatctgaaggtatctcatctgtgcctggtgccataatgtcttccggaaaatgagcaactgtttccccaatgtactcttcaaacttctgtttagaaacagccgagaaatcactttccaagccataatcgtcataacggcaacggtccagaattattccatccaagtcatatttagccaggtcacccagtaactgcaaaacgaagttctgcacatcatcgttagccggattcaaaaatttagctccataatcggtctcgtcattcaacaaatccatcgtatttgtcagaccgtcagcgagattagccacacttgcccattccttcttcgagtcatcacggaacagtattccatctgatccgaggttatagggacataagtaaccaccgacgaaagtattgactgacgcatgtactttcagcccctgacttctggctgcatctataaatgcctgcaggtaatcccatgtttcagtacgttcataatatacataacccgaacttccccacacatccattcgcttcacctgatctactgcagtagtgttgaacaaaacatctcctgtagtgggacgcacgtcaacaatgatatcagtaaaccctgcgttttttactttcaccatatctgtggagatattctccttattattcgcataatccggaaaattagctgccgcatcaatccagacatagcgtggcttgatttctgttacatccggattttccggtccctctgttgaattatcattccagggccatccggggattccatcagaatcatcactacatgaagtgatagcaaccattccgcaaaacgtcaataataatattttaaaaagatttctcatattatatatgtttattaatgtcagtaactcttttgaaacacattaattatttgtcgatacaatcaaattcataccctccgataatcttacagttgttgtcaacatagtagagacgaagtttatatccatctgtagttggagcaaacaatacatcacctgttgccgctacaccatctgcagaaccgaacgaagaaagtgaaggattgaatgtcaaagcgtctgaagtagataccgtaccggtaaacgatccgtctgaggttacatcgtacatatataagtacggagtgcctccccattgcgggaagtgagccgtagataccaatacaagatactgcgcattattgaacgttcttgcatccagacagttattattcattgcccaggaattgccattgtccgaattggataaagacttggacgcattattacttgttccattcacccaataaagtacgttaggatcataataggataagaaataatcgctttgtgcagtagttcctttggtgacaaccttggtatttgacacaggagatccccaatagccaacaccatttaccgatactacttcaggacttcccaatacaccgtctgttataatccagcgaacaaacgtattagaaccggacgaggctgtcccgtcacatgtagcaatgatagcggcatttgtattgatatcaccctgtacagatactttggtacccatatccaaacttgtattgttggtataagatatcaataaagttggaactgtggttacagaagaagtcttatagatagagaaggatttaccattagctgcttttgttgccaacaatatgtttcctttactatcacttgtcacacaacctaaagatgcaacacctacgcttcccaaagtcatattgccaatcttacttcctgtagaagcattataataggtaggagcagtagaaccgtcccctaagcaaacaactaaattattgccattaacggccagtgaaggtgagttggctgaagtccagggcaaacctataactcccatatccaatttaaacaattctgtctcactgccttttctatatccataagggatcttatccggcactgccttctgaactgtgtacgtctgcttcgtcactccatcgtgagcgatgaccgtcagttctacaggtgaattgaagtcaagcgcctctgtcttaggatccggcgacattgtcgcatgagaggaaagtgaatattctgccagacaggaagataaatcttctgcagaaatcagagataccgtcttatgctcttcgtcaataattccactaatatcttcggccggtattgagaaacttaataactgacatttattggatttcactctttcacccgtaatgcagatttgtttcttatatccctgcgcatctgtataagtgaagtaattttctttagtcaaatccaatatcgtcaaaacagggttaatagtacagttaggagctaactttgcctggaccctcattgtcttcatatattccgccgtttcattttcactgtcttccggataaaaccatggtataggaatcacatatttatctacagacgcatccgcaattgtgtagacaacagcttctttgtccacataaggacctgatgtaaaaagtgcggtcaagcttgtgattccctgccgctcagcagttggaagtacatattccggatcttggcaggaactcattaatgccaatactcctaatagtaaatattgtatattctttttcataattgttttcattttagatttattgccattctgcatattgagttaccgcaccgttattgtccaactccgcctgtggcatagggaaacggtacatcttagtcgggaagttacgatctttgtcatcacactctacataaatgtaattgaacgaaccgtttgcattctgttctatcttaagtccatgaagacggataccggtgaatgccgttgcagatagtttccagcgacgcatatcccaataatagtgtccttcataagctaattcgactttacgttcctgacgaatcgctttcatcaggtcttctccactcttgtccgaataaggcaagccgactctgttacgaatgtctttgatgtctttattggctttatcggcatagccactcaaatgatagcaagcctcggcatgatttagtaacacttcggcataacgaatttcggtccatggctgtgtacttgcctgcacagaagtgaaactatgagtctcatccaccagcttacgcaaataataacctgtggtagaacgtccttctggtttggcatccgttttccatgcagcccaaccatcagtaccattgacataagatgcgatcgttctgcctttccacgtcgcaccattataaagaatggttgctttgaagcgtggttcaagtttatcgtatggaggagttgccgttgttccttctgcagtatgccaggtactccaatccggaaaaccgctaccgtccgcatattcataagattctaccatttcttgtgtcggagttccaaatcctccggtcattgaattaccatccaatgctttatcacctccgggagccatatagccgtcaaaatcatgagttacagtagaactcttgtcatagcaatattgcagaatagcttcctgacttcctgctttaaatgcattagaataattctctttttcttccagcttatatcccatgcccatcacttcttcggcagcgatccgggcatcatcccatctttctgcataaagcattgcccgtgacagcattgcataagctgctccgctagtcagacgtccattaggggttttatcaaccggtaaatgttcgcccgcaaacttcaggtcctcatatacaaagttccatccttctgcttcggaactgaccggcatatccttctttatattatccagatcttcatcatatataatgacttccttataacgttttaccaagtcggtatataaatatcctctgaagaagcgcatttccgcttccagccgttcttgttccgtctgaccgaatgaggcgtactttttcagtttattgagaccttcattgacacggcgtacatattcatacatcgtcccccaattgcctaaataagtgctgacataacttactgtcagaacggatcctccataagcgatttcgctaggtatctggcatttagacatatagttataggaaccgtatttgagttggtctgtcaacgcttccgtcatgcctgccaggcattgtccgtcacgataaactcctaaataatcgatataacggtagaaatcgttgacagcttgttcggcatattccagtttactccatactagtttatctgatgctttgtccgtcggtgtcatgtctagataatcactacatgaaccaagccctaaagaggctcccaacaatatgatacttataaattttgttttcataataaatcttttaaaggtttagaaagtcagagttataccgcccatgattgtgcgttgttgaggataatatccgttattcactcccggagattcggggtcgattccatcgggaagaccggagatcgtgaataaattggaaccttctacataaattctaagattctgaattcccacagggctcatccactttttagggaatgtataacctagctgtgccgatttgagacgaaggtatctgccattacgcaaccagaaggtagaagctaatccattgtctcctccatgtccttgatttcccagagtcagacgtgggaatgttccattcggattttccgtggtatacgcattctgaaccagatataaaggtgagttggcaccttctttgaatgcttgtgtccagaccgtattgtcatcataaccattatagtaagttccggttaatgatacatcgaacaatgcgcctccagtaaattgtgcgcttaaatcaaatccgttccaggcacaattcaagttcagaccataagtcagttccggacgattgccccgtcctacacgtgttctgtcatcttcatctattttgccatcgccatttaaatccttatatttgatgtcacctacattaggacgggttccataccatgcggaattatcaatttcttcttccgaacggaacaaaccttctgccacccatacgactgaagcgtctacactgcgacctgtacgttttctccattctacagtattgggactatccggataacgaagatagcgatttcttgcaaaagtcaagttgaaactggctccataagaaaatggtttccctgccagatttaatttattacgatgactcactgtgatttcaactcccttgctgtctaccttgttatagttggcatacgtataataatatcctcccattgatggtggataatcgcctcccattgctgtcagaatatcataggtataattatagaatgcatcaaattccatacccagtaaaccattccacatggtaaagtcgaaacctgcattgtaagttaacgtgttttcccacgtcagagtaggatttgcaattacagatgcacgcagcgcctgcatgacttttccgttcagaattgtctggtacgcatttttgttaccgtccatcaggttataagtactaaggaatgcatacggactcacatcgtcattacccaacaaaccgatagatgcacgtattttcatatcatctagaaaagtcagatcggacataaagttttctttggatattctccacgctactgatgctgatgggaaaaatgcccaacgttttccacttacattgcccgcaaacttatacgaaccgtcatatcgtcctgtaaattctgccagatacttattgtcatagtcgtatttcaaacggaaaacgtaaccaatgctacgattggcatcactgtagccggaaataggggagtctgccggttgtccgaaactcaattccggaagttctgcaaaactcatattcttattatatccggagaaactgttttctttataatcacggatttccgcaagtaccatggcttcaacattatgcttaccgaaagaattcgcataattgatgcttccctggcctaccatttgacgggaactgaattgtccttcacctaaatttattccatttgcagttccacgaggatcatccgctttagtccaagtccagtccgtagtggaggtcggcattttattgatataagtagaataaggtgtattcaggtttttattatgcgaggtcttgtaatcataagctccggtaacctttacacttaatccttttacccaaggcagattatattgtaaagagaggttagtctgcaaatcaaagctattagtatgtttgtagccggattcataaatagctgctaacgggctattcggtaagcttgtattattctgtgtagtagcggtataaagtccatcatatttttccggtaaatacggatgcatcatgacagtctggtgagctacggataaccagccctgttctcccaatgtggaattagaatccgtaccaccggaagcatatcccggagtttcacgttttcctacatttccggcaactcccaaacttaactggaaattcttggccagctgagtttcaatgttggttcttaagttataccttctataagtaaagttatcaatattaccatcctgtcccaaatagccgacagaagtgaagtaacgcatcttatcactaccaccttgtacggtgatgttatgtttctgattgatacctgtgccaaacactttatcaatatagtttacattatcccatccatcagtagggtcgccgttcaacatcgcttctacatttgcttttgtgaataccggtgtatattgcttcatgtctgtaatacttccgttagccagcttatccatcatatcagccatattataataatatgcaaactggggaccattcataaactgtggaaagtttgcattcatagatgctcctattgaaccgttatatgtgattcttgactttccttcctgccctctctttgttgtaacgatgataacaccacctgcaccctttaaaccgtacacagccgcagaagctccatctttcaaaacagatacactctctatatcattaggatcaatatcattgatggaacgaggcataccatctacaatataagtaacattgtaaatagaaccacgaacccgcaatactgcttggtcatcacccggttctccggagacctgaacagaagaaatgcccggcaaacgtccgcctaacaaacttgatacattggttgccggtgcctttaacagttcgtcgcctttgaccgcagaaaccgctcctgtcagggattgtttctttgcagtaccataaccaacgacaatcacttcatccagagatgccacatcatccttcatcaccacattgatcgttttctgtccggcaacttttatatcttgttccgccatacctacatatgagaaagacaatatatcttttgaagtcgcctgaatgctgtattttccattaacatctgtaactgtaccattagtagtcccctttactacaacacttacaccaggtagagattctcctgtctcatcagtaacagtaccttgtaccaaactctgtgcatgagcattgatagcacatgcaaaaagtgcgcatattgagaaaagaaatatcttcaatatgcgagagttttgcttaatttttgagttaaactctgtcatagaattaatttttagattattaataagattggttaacataataattcattgtttctatagctgttccaatactttccagcattgaaataatccccttggtacatgaaagcaccctttccatttaccacctttcagcggtaacaaaacttcccctctgcgattcagatatccgtaccattccggatattccggatctttgaagtgcgaccatgtgtagtcatgcactttttcaaaccattccagacatttcctgtctccggtcagctgataacctttcagcagtgatatcagagcttcaatatgcacccaccagagtttctgatcccattccaattgttggggaggacaaccgttacggtccataaagtaatagatacctccatattgcttgtcccaaccatagtcgagcattgtcagggttacatcttttgctttttctatcaattccggacgattcaggcgtttgcccaaatccatgatgaaccacatcgcttcaatagcatggccgggagtcacctgacgaccttcgaagcaatccatcagattaccgtccatatcaacattctcaacaatgataccacccaactccggacgataaaagacatccatcacttcatagatacaggtttccatcgtctgttccagataaccgggatccagcagatgttcgatctccaaagccagattacagagaatcatcgggagagcgaagttcttcagattacgagtgcccggatgaagcttgttccacttgcctttcggattatcaaccttagaaaggatgatttcaaaggtcttctttgctatgtccgcatactcctgatttcccgtagcaagactcagctgtccgaaggccatcgtggcgaaagtatatgagaaaatattgtatggttctaccagtggtctacccgaacggtcgagtgaaaagtaccagttataattcccgtcatgtccgtatttttttaagaattcaccaccctgaacggcacaatccagccattcctgtcgtttttccactttgttgtaaagcatggagaacatccatacctcacgtccctgcaaccagatgaacttatccgtatcgaaaaccttcccttcacggtccaggcagctgaaataaccgccaaactcaagatcttgagagtgctcgagccagaatggaaggacattgtccaacaattcatcccggtactgattcgctagtttcttaaaatccataatattgtttttattatagataggtatagggtacaccgaaggcgggaaacgtttcttgaatggccatgcagaaaaccgcctgcggcttctctatacttctcagttgttgttagtttactgttattaaggtctctttctttcttctactgttccgaccgggtccagtatctttcaatctcttccagtgactttcctgtggtctccggcacgagtttccatacgatgagcatatacggcacgcacatgactgcgaacaggaagaatgttccggcgggggtgagattctggagcatccagggggttagctgtccgatcaggtacgttcctatccacagggcgaatcctgcaatggacatcgccagtccgcgcaccttggtggggtacatctccgaaaggagcacgaacaccacggcacagatggagacggcacagcagaatacatagaacaggaagaaaacgagcaggaagaggctggatactccccaggaatcaccgaagaggaagtaaatgccgatcagcaggagggagacaaccatccccgaaactccgtaatagaccagttgcttgcggccgaccctgtcgatgatcacaagagcaagaacggtggtcagagtgttgactagtcctacgagaacttggtaaaacaaagaatctcctcctgaaagtcctgcgttttcgaaaatggaagggccataataaagtacagcattcacacccatgaactgtcccaaaatagcaatgcatacaccaatgatgaccgctttaaaaattccgggtttcattaacatagcccattcagattttgtttcagacgtcaatacagatttcgtttcttttaattgacttgcagcctctgaaactgaattatatatcctttctaatatattgacagctttttcttctttacctcttacgatcagccaacgaggactctccggaataaagaagataatgatgaagaataacacagccggcaatgtttccattcccaacattcctcgccagacttcagtaacaaatatcttattcaaccagtccatacttaactgattaccactttcagcataagccagcaattgatagttaatcaaataagctcctaaaaatccaactgtcacagccaattgatataaagataccaaacgccctctatattgtgccacagccacttcagatatatacaaaggagaaacaatcgacacaacaccaataccaactccaccaataatacgatagactaccaattgggtgaagtctgcggagatcgcacaacctaaagccgatgtagaaaacagagtcgctgaaataatcatcgtcatttttcgtcccagcttatcactcaggataccggcaaaaagaacaccgacgatagaacctattaaagcacatcccacataccacccctgttgcaacgtatccagttgaaaaagttgagtaacctgagcgattgttccggatataacagcagtatcatatccgaacaaaaatcctcccaaagctgctacaacagaaaggaaaataagatagccaaagttaattgtagacttcatatcactcatttgatttcaaaatattctctgtatctatcatataaatgtccggcctgcaagtaggcagattgaggactcataaaatgagaaaattcgaaagtaatagccttatcataccctgcacgtttggcagcttccagcttcatccggagcttatcaaatttaatgggtagaaaacggataggcatatcacggtcaaaagactcggcgttggtccagcattgcataccatacttatctgctaattttttatttacagtaaagaacgcatccaactcatcataatcgatatgtccatcctgaaaagcacaagcatctaccacttcatgaattccatcaaaaatttcattccattctttttcgtgttgttgtacagaaaccgcatcttctcttgtcagtttccctgttcccataatagcctttttgccatcaatccacggagagataaaagtcgggagtccgttcgatacatctttacattgctttcccatagcacggaaagcatcaatagcccctttcgtggcacggctaatctcgccgctgatgtaccagcctccaaaacttttatacttctctccgtacatcttccaaacctcatcaatcacatacttgttatcctcaatctcccaacttaaatcacctgtatcccaataccgtcctgaatcatacaaaccaaaataaaatttcatgttatacttctccgccagacgcaaatacatatctaccaaatcaaccgacggcatataacatccttttttcagcaaataaggtgaagggtaagtcataaacttacgataaccggaacgaatcataatcactgtatcgataccgattcttttcatatgctgaaaatccagatcccattctttctcaccccagttctgatgaggaatatcatgagatatttcatccaaaaaagttcctgtaatttttaagccattatttttgggaacaatcaatttgctttccaaatcgccagccttgatcttcggggagagttcccctctcccctctccgtcagctgcaaataatgaaggggcaaccaaagcggaagctccggccaaagctgccttctttaagaaatctctacgattattagtttccatagttttatttttttgtttttacttggatatatgttaacctattgaatatacttaccagtgatatcgatctgttttttattgaaaggatccaatacctgatcaatcattacagccatctcccctctcaaaatattccgtttcaaatccggttcttgcattccgtatgctttccaaagcgcttgcggatcaacagtagtatgtagtttttccgtttctgctatcttctgaacaagttgaactgcctcctcaatacttaatttatccgctcctgtttttttgaattcatctttggcagccggatacacttcaaacagaccatccagttctgacgccagcaataccgtatccgctctcaaccaagtctgattggaccagtccacattcttaccgactcctttgagaatccccgtagaaccaatccgctgataagaagcaaacttcacatccgagacagggacatccagataaggaagcaaatatcctttagcatccaaaatagcattctgaacatcacgaacagaaacatcacttatcttctgattattcttcacagcaagtgcagccaaagctcctgccgcctgaccgatctgcagtacaaccggttgcaaacgagtcgttccattcataatattcgatacggaaatagatttctctgcaacaatcagcccgtctacctcctgaggaatcaatgtacctaacggcaacccatacgaagggatcggatgaaaatacagattaggcaactcttcataaccatgatagcgggtatggtgatgatctaccggataatcacccacagcaatacaagtacggtacagcttttcatcctgtgtatatggattgagtgcatgattcaagttaaagcggactaatccgtgaattcttctggactctctatgataagggataaaaggtaacttatcctctgtcggatattcatcatccgccaatccaagtgtattataccccagttcatgttgcaggaagtaaacaaaacacatcgtataatgtttcgcatattccaatgctttcacgcgttcttccggagtcatttcaatcagattaatataataatcattaccttctatcggccaattaatcatatatttatgattcggcaaccgcccgtaggtaatcatcatatctttagaccagacgcgatccggctctttaggagttatgcataccggactggcacaggcacaggcaaattctttaggatcgtatccttcaggttccggaatagtcacatccttaccataatcttttaatatggcaacataggtaatatcctgcacaatattattcttcttttccggagcaatatcctcgtgcgtgtcatctctgctttccataccaatatcgtacttcactccacacatttttgccacatcacccagttcggtggcatcaatcatgaccttcgcccgaaccgttttcacaccttgtccttccaccttcactttagcgacccactcatctcccgtcctttttacttcttcaaggcaagcctgtttccagacttttagattattttccgccgctaccatttcgtgaagaatcttatttccaactgacggttcaaacaatacgttacttacccaacccgtcttcaaagaatccagcccgccataataatcagacaatctattcttaaattctccccaaagtccggcaggcaatctgtaatttccatccacagcactcacaccggcagaagtcagcatcccacccagccaggtgctttcttcgagaatcagtgtattggctcccatacgagcagactggatgccggatgttacaccactggcacctccacctataataagtacatctaccttatcttcctctgagtgcatacaagaagagtatgatactaccagaaacagcccacagagtatttggaataagtttttcatcataatacgatttggttacggtacatcttaattaatatcacggtacaaatatagctatatttattaaataaacaatagataataaaatattttattaataaagttgatttttgcttctttattcattaataagactataaatatgaagctattcagataccagtacccttattaccttattatataagaagatttcaaataactatcaatgagagaattcactttctataaggaatcagcacagcatcatctcagattcaattctaattttttcgtcaagaaccttattagttaataaaaaaattaattatctttgtagatattacaaaatataagagacgtatgaaccaacaattcttgaaagaaatagaaatgggctctaaaaatgccctcgttaaaaagaggatcattacacattatatatataatggtagttccactattcccgatctttcaaaagaactagatctaagcgtgcccacagtcaccaagtttatcggtgaaatgtgtgaggacggatatatcaatgattacggaaaactggaaaccagcggtggacgccacccgaatctctatggactaaatccggaatccggttattttataggtgtagacatcaaaagatttgcagtcaatatcggactgatcaattttaaaggtgatatggtagagctaaaaatgaatatcccctataaatttgagaattcgatagaagggatgaacgagttgtgcaaactcattctcaacttcatcaaaaagctccctattaataaggagaagatcttaaatatcaatgtaaatgtatcgggacgagtaaatccggaatccggatatagttttagccagttcaattttgaggaacgcccgttggcggatgtcctatcggaaaagctgggtcataaagtaaccatcgacaacgacacccgtgccatgacttacggagaatatatgcaagggtgtgtaaaaggagaaaaagatattattttcgtcaacgtcagctggggagtcggcatcggaatcattatcgacggcaaagtctacacaggaaaatccggtttctcgggagagttcggtcacgtcaatgcatacgacaatgaaatcatctgccattgcggcaaaaaagggtgtctagaaacagaagcatccggctctgcccttcatcgcattcttttggagcgtattaaaagcggagaaagctctattctttccacccgaatatccggtgaagaagaccccatcacgcttgacgaaatcatcacagccgtcaacaaggaagatctgctttgtattgaaattgttgaagaaatagggcaaaagctgggaaaacaaattgcaggattaatcaatatcttcaatccggaactggtcattataggcggaactttatctttaacgggagattatatcacccaacccatcaaaacagcggtacgtaagtattcactcaatctggtcaacaaagactctgccatcattacatccaaattgaaggataaagcaggtattgtaggcgcgtgtatgctggcacgcagcagaatgttcgaaagttaaactaccgttactttatgcaaagagttatggtaaaggaagattttaaattaaagctcaaaaaatattcagaatccttttgttttctcaaataaagctgtaattttgcacgccgtaaacgagaaacaaaccgccgctatagctcagttggtagagcaacgcattcgtaacgcgtaggtcgccagttcaagtctggctagcggctcttgacaataaagcgctaactacagaatagttagcgcttttcttattaacccccaaagcaaatcgcatgaaacgaggtaagagcaggagattatttaagaaaaagaagtcacattccaatcaaagattagggtgtatcatcgctatcatcgtacttattcccatttgttacgggctttatctgtattatcagcaatacagtgtccagcacagtagcaaaccgcagatagagacttccgtttccctccccactccatccggcaaagatttagagattcccatttcattgattccccgtcaggagcagatcattcgtcataaaggttatacggtttcctacaataaagatctgaagattccgaattgggtttcttacgagctgacccgtcaggaaaccaaaggaaaagaaaagagaggtgacaacttcatcgccgatcctttagtaaaaggcgccattgcgaccaatgcggattatgcacgctcaggatatgacaaaggacatatggcaccagccgccgacatgaaatggagtccggatgtcatgaaagaatccttctatttcagcaatatgtgtccgcagcatcctcaactgaacagaagaggctggaaaaatctggaagaaaaaataagagactgggcggtagccgatagtgccatcatcatcatatgcggccctatcatcgacaagccgtccaagaccatcggaaaaaataaggtggcagtgcccgaacgattcttcaaagtaatcctctctccttttgtcaaaccggctcgtggcatcgggttcttattcaacaacagacaggcagtagagcccctttccacctatgcagtatcaattgacagcatcgagaaacttacccatatggacttcttctctcccctgcccgatgaaatagaaaatgcagtcgaagccaatgccgattattaccagtggccacgctaatagttgacaaaatcagccgaatttcaactattcaccgttgaaaggaatcgctcctatccaaaatcttcctatctttgacgcaatttttaaagttacgtcacaagatgaaaaagaaaacaagaaatatcttattatccgttctgaccggagctctccttctttgcgccattgccggaggaacagtctattattatctctttgctcctcagtttcatccctccaaaaccgtctatgtatatgtagaccgggatgacacggcagattcaatctacaataagatcagacaaaccggtcatgtcaacaaattcaccggatttcaatggatggcaaaatatagaaaattcgaccagaatatacataccggacgttatgccatccgccccaacgaaaacgtataccatgtattcagccgcttcttcagaggttatcaggaaccgatgaatctcactatcggaagcgtacggacactagaccggctggcgcgaagcatcggcaagcaactgatgatcgactccaccgaaatagcccgccaactattcgattccgcttttcaggccgaaatggggtatacgccggtcaccatgccctgtcttttcatccccgagacctatcaggtatattgggatatgagtgtcgacgacttcttcaaacgtatgcagacagaacagaaacgattctggaatgacgaacgtcttgcccaggcaaccgctatcggcatgacaccggaagaagtctgcaccctcgcctccattgttgaagaagaaaccaacaacaacgaagaaaagccgatggtagccggactatacatcaaccgcctgcacacaggtatgcccctgcaggcagaccctaccatcaagttcgctttacaggatttcgggctgcgacgcatcaccaatgagcatctgaaagtcaactcgccctacaacacttatatcaacagcggtttacctccgggacctatccgcatcccctctaaaaagggcttggacagtgtattaaactacacgaaacacaattacatttacatgtgtgcgaaagaagatttttcaggtactcacaatttcgcatccaattatgccgaccacatggcaaatgcaagaaaatattggaaagcacttaatgaaagaaagattttcaagtaattttgtgataaaacgagccaaaaaggctatctttgcccgatataataacaaactgtgatcaacactaataaaggaaatatatgagcaagcaactcttacttggcgatgaagccattgcacaagctgcactggatgccggactttcaggtgtatatgcctaccccggtactccttcaactgagattactgaatatatccaaatggcgcctataaccactgagcagaacatacataatcgttggtgtgccaacgaaaaaactgccatggaagccgcactgggtatgtcatttgtaggcaaacgcgccttagtgtgcatgaagcatgtaggcatgaatgtggctgcagactgtttcgtcaattctgccatcacgggtgtgaagggaggactgattgtgatagcggcagacgaccccagcatgcactcttcacagaatgaacaggacagccgcttctacggagacttctccctgataccgatgtacgagcccagcaaccagcaggaagcatatgacatggtatacaacggattcgaattctctgagaaaacaggcgaaccgatcttaatgcgtatggtcacccgcctcgcacactcccgttccggagtagagcgcaaagagcagaagccacagaacagcatttcattcagtgaagatccccgtcagtttatcctgttgccgggaaatgcccgcaaacgctataaagtattgcttgcccgccaggacgaattcatcaaagcttccgaggaatctccttacaacaaatacatagacggccctaacaaaaaactgggaatcgtcgcttgcggtatcggctacaattatctgatggaaaactatccggaaggttgtgaatacccggtacttaagatcggccagtatccattgcctaaaaagcaattgctgcaattggttgaatcctgcgacgagattctggtactggaagacggacagccattcgttgaaaaacatctgaaaggctatctgggcattggtatcaaagtaaaaggacgtctggacggcacactgtcacaagacggagaattaaatccagactctgtagcacgcgcggtcggcaaagaaaacaaatcggaattcggcgtcccttctgtagtcgaaatgcgtcctcccgcactgtgtgaaggatgcggacaccgtgatatgtacgtcacactgacagaagtactcaaagaagaatatccttcccataaagtattcagcgacatcggttgctatacgctgggagccaacgctccgttcaacgccatcaattcatgcgtagacatgggagcttccatcacaatggcgaaaggtgcggccgacggaggccttcatccgtccgtagctgtaatcggtgactctacatttactcactccggaatgacaggtttgctggattgcgtcaacgaaaatgccaatgtcgttattgtcatttcagacaatgagacaacagcaatgaccggtggtcaggactctgcgggcacaggacgtattgaatccatctgtatcggtttaggagtcgcccctgctcatatccgtgtcgttgttccattgaagaagaaccacgaggaaatgagacagatcatacgcgaagaaatcgaatacaatggcgtatccgttatcatcccgcgcagagagtgtattcaaacattagcacgcaaaaaaagaagtaagtaagccatgaaaaaagacattatattatcaggagtaggtggacagggtattttgtccatcgctacagttattggtaaagctgctttgaaagaaggactttacatgaagcaagcagaagtacacggaatgagccagcgtggcggagacgttcagtccaacctccgcatcagcgacaaaccgattgcttcggatctgataccatccggcaaatgcgaccttatcatttcgctcgaaccgatggaaggtctgcgctatctcccctatctcagtccggaaggatggctggtaaccaacgaaactccgtttgtcaacatccccaattatccggaagaagacaaagtaatggctgaaatcaacaaattgccgcataagatcgtactgaacgtggataaagtagccaaagaagtaggttctgcacgagttgccaatatcgttttgctgggcgcaaccattccattcctcggcatcgattacgagaaagtacaagacagtatccgcgaaatcttcctgcgcaaaggagaagctattgtcgaaatgaatcttaaagcactggctgccggcaaggaaattgcggaaaagctaatgcaataactatcacaatcatgagtacacaatactgggaagaagaaattgaaatcatgagtcgcgagaagttgcaggaactgcaacttcagcgactcaaaaaaacgattaacatagccgcaaactcaccttattacaaagaggttttcagcaaaaacggcatcaccggagatagtatccaatcactggacgacatccgcaaaattcctttcaccactaaatcggacatgcgtgccaactatcccttcgggctagtggccggcgacatgaaaagagacggtgtacgtatccactcttccagtggaactacaggaaaccctacagtcatcgtacattcacaacatgacctcgactcatgggcaaatctggtagcccgttgcctttacatggtggggatccgcaagacagatgtcttccagaacagctccggatatggaatgtttacaggtggattaggtttccaatatggtgcagaacgccttggctgccttaccgtacctgccgcagccggaaacagtaaacggcaaattaaattcatcagtgactttaagactaccgccttacacgccatcccaagctacgctatccgtcttgccgaagtatttcaggaagaaggtatcgacccgagagaaacaaccctgaaaaccttggtgatcggcgccgaaccgcatactgacgaacagcgccgtaaaatagaacggatgctcaatgtgaaagcatataatagtttcggtatgacggaaatgaacggccccggtgttgccttcgaatgccaggagcagaacggaatgcacttctgggaagattgctatctggtagaaatcatcgatcctgaaacaggagaacccgttcccgaaggagaaatcggtgaattggtactcactacacttgatcgtgaaatgatgccgcttatccgctaccgcacccgcgaccttacccgtatactacccggaaaatgtccgtgcggccgcacccatctccgcatcgaccggatcaagggacgcagcgacgatatgtttatcatcaagggagtcaacatcttccccatgcaagtcgaaaagattctggttcagttccccgaattaggcagcaattatctgattacgctggagacagtcaacaatcaggatgagatgatcgtcgaagtggaattaagcgatctttctacagacaactatatcgaactggaaaagatccgcagagatattatccgtcaattaaaagatgaaatactggttaccccgaaagtaaaactagtaaagaaagggtctctcccgcagagcgagggaaaagccgtcagagtgaaggacttaagagacaacaaataaatattcaaatgcccgatgtgctaatatgccaacccaatactgtatgatatcagtaacaaatggcatattagcacattatttaattatcagattataatgcaattactaaaaaaaagaattctgcaggacggaaaatgctacgaaggaggcatccttaaagtagatggttttatcaatcaccagatggatcctgtcctgatgaaatccatcggagtagaatttgtccgccgctttgcagccacaaacgtaaacaagatcatgactatagaagcaagcggtatcgctcctgccatcatgacgggctatctcatggacttaccggttgtattcgccaaaaagaaatcacccaaaaccattcagaacgcactaagcactaccgtacactcgttcaccaaagaccgtgattatgaagtagtgatcagtgccgattttctgactccaaatgacaatgttctttttgttgatgatttccttgcctacggaaatgccgcattaggcattctcgacctcatagagcaatccggagcaaaattggtaggcatggggttcattatcgaaaaagccttccaaaatggacgtaaaatactggaagagaaaggtgtcagagtagaaagccttgccataatcgaagacttatccaactgctgtattaaaataaaagatcaataagctgagtcggggttaaaataatgccccttgccttttgtctttttaccatattgcaccgcatgctgagggcacacatgataacatgccaggcaggcggtgcaattctttccccaaaccggtcttctttccttcatcgttatattccctaccggacaacttttttcacagcgcttgcacccgatgcactcactcgttgcatggaaaggtttgggagacatctgataacgaacaaataacggattgatgatcctcgtcttgataaaaggcaaactcccctccttgcatgcaaagacagtttctctcccggttatcagtctactgactttttcaagagccggaaccgcttctgccagttttttcttttccagttccttgctatccacatcaaatccgaggaacaacacatagttattgggcataattacagaaaagcctgcattacatctccatcccctcgcagccaatgccttttccatcacctgccgggtcagccccgtatcgtctccacacgaacacacaaagaacagatattgctgctgataccccttcagaaccagcttccgaataaactcctgtacaatcacgggaggcgcccacgaatagaccggaaagacaaaaccgatcttctcatcctcccgcaaagagaactcccatgtgtcattcttccatgcgtccgggataaaaaacaaatcttcctgttgttctttagaaagctgattagcaatccatttagagttacctgtacctgagaaataaaatatcatagaagagtatataaaaaagccgcatcgacgatgtgatgaaactctgatagaacaagatttgagcgctcgccctctttgtaatccaccggcttaaagctgtcccgaaggatgtggcccgccattgaagaacgaagctttctcggtgcatcagattaatttgaagagtttcccgatccagtcgatacggctaatatttttctatcacaaatgtaataagattctctgagaatagcaagaaaaagaaagaatttgttcgtccactaacattttttttcatcctttctctccgcctaacaaaagaaaagtgccagttatcggatcgataactgacactttgtaaatcctaaactattgaaacttaagcagcttttgctttagcaactacagctttgaaagcttccggatgattcatagctaaatcagccaaaaccttacgatttatttcaataccggctttgtgcaaaccgcccatcaatttagaataagacattccttcaagacgtgcagcagcgttgatacgttgtatccaaagagcgcggaagtttcttttcttatttctacggtcacggaacgcgtaagtcaaacccttttcccaggtgttttttgctacggtccatacattttttcttgcaccaaagtaacctctggttaatttcaaaattttctttcttcttgcttttgaagcaacatgatttactgatcttggcatagttttactttttttgaatgttagcgccgttacttcacgcaacgaacttcaggctaaagcattcggttaatactttaataatactttgtacgcttttgattacttcattgctaagagttccttaacctggcttacatttgttgtatcaacagttgtagagtagcacagatttctttttctctttttcgatttcttagtcaaaatgtgactgtgaaaagcgtgctttcttttgattttacctgttccggtaagggtaaacctttttttagaaccggagttagtcttcatctttggcatcttacttgtttttaaaattattaaatatataatggtgacgcactatacctgcgcgccacgcattcattcttttttattcttcctcgcccgcttccggcttttcagccttctgtccctgagttaccggtttggaagccgccggttttttaggcatttcctttttcttcggagaaagctggattgtcatacgcttaccttcaagtaccggcatctgatccacctttgcaaaatcttcaagatcgttggcaaaacgaagcaataacacttcaccttgttccttgaaaaggatggaacgccccttaaagaatacatatgccttcactttatccccgtcttccaggaatcctctggcatgtttcagcttaaagttgtaatcatgatcgtcagtctgcggtccgaaacggatttcctttacgttcacttttacctgcttcgctttctgctccttctggcgtttctttaattgataaagaaatttagagtaatcaataatacgacaaacaggaggttgagcattgggggaaatttcaactagatccagctctttctcttcagccattttcaaggcctgaaagataggatatactttcggttcaatctcgtcgcccacgatgcggacttctttggcacgaatctgttcattgattctatattgcccttttaaagtgtcattcttcattaaaaacgtttacttcctagtttgatttttttattgttctactaaatatttatcatgaaacggctgcaaagttaccatttatttatcatattctgaacttcttcgttcaaaattttagcaaattcttcatatttcatggttcctttgtcgccttccccttgtctgcgaacagaaacttcaccattttcagcttctttttcacccacaatcaacatataaggaatgcgtttcatttcattatcacggatcttgcggccgatcttttcattacgatcatccacaatagcacggatttcatgcattttcagatacatcttcacttgctctgcatactcattgaacttttcactgatcggcaggatagctacctgatccggagtcagccacaacgggaacttaccggcagtgtgttcgatcaatacagccacaaaacgttccattgatccgaatggtgcacggtgaatcatcaccggacggtgcttctggttgtcagagcccatatattccagttcaaaacgttccggcaagttatagtctacctgaatggttcccaactgccaacggcgaccgatggcatctttcaccataaagtcgagcttgggaccatagaaagcagcttcaccgtactcaatcttagccggcaagcctttttcctcacaagcctcgataatcgcctgttcagctttctcccagttgtcatcgctaccgatgtatttttcacggttcactttatcacggagtgatatctgagcctcgaaattctggaaattcatcgaacggaacacgatagaaatgatatccatcacacggaggaactcatctttcacctgatccggacgacagaaaatatgtgcgtcatcctgagtaaagctgcgtacacgagttaaaccgtgaagctcaccactttgttcataacggcaaaccgtaccgaattctgcaatacgcaacggaaggtccttgtatgaacgcggaaaattcttatatatctcgcagtgatgcggacagttcatcggtttcaagaaatactcctctccttcttccggagtatggatcggctggaacgcatccttaccgtattttgcatagtgaccggaagtcacatacagcaacttattaccgataggcggagtaattacttcctgatagtcatagcgggtctggatacgacgcaagaactcttgcagacgcaaacgcagtgcagtacctttcggcaaccacatcggaagtcccttacctactgtttcagagaacatgaacaactgcatttccttaccgatcttacggtggtcacgtttcttggcttcttccagcaacaccagatattcatccagcattttctttttcgggaatgtgataccatagatacgggtcagcatcttacggtcttcgtgaccgcgccagtaagcaccggcaacagttgtcagcttgacagccttgatcggcgcagtcgtcatcaagtgaggaccacggcaaaggtcagtaaacgcaccctgggtgtaggtagtaatatgtccgtcttccagttctgagatcaattcacatttatacgtttcgccacggtcgccaaacattttcagagcgtccgtcttcgaaatactttctctgactaccgcttctttctttgccgacaattcaagcatctttgcttcgatggcaggcaggtcactttctttaatcacagcttctcccggatccacatcatagtagaaaccgttttcgatagccggtccgataccaaactggatacccggataaagttcctgcaaagcttcagccagcaagtgggcgcttgtgtgccaaaatgcatgtttgccttcttcatcgtcccatttgtaaagtacgaaatcagcatcttcattaataggacgtcctaaatcataagtctcaccgttcacgccacatgcaagtacatcctgtgccaagcgcgaactgatactttctgcaatctgtaaaccgttcactccttcgttatactcacgaacggagccatcgggaaatgttatctttatcataatatgatgatgttatattttcataatgagaacgcaaaagtaacgaaatcttttgagttttctattttttatcaaaaaaatgttattctgtctgatccgtgaaacgcttgatcacgttgtaagcagaaacaactcctagttcaccggccttgctcaaatctgagattcccgccttattattacccaggaaaatatgcgtaagtccccggttgaaataagcgtcagcaaagtccggagacagctgaatcgccttatcgtaatcgacaatcgcagccctgtaatctttcagcatagccgccacattggcacggttataataagcgtaaacgaaatccggagccagagttatcaccttatccaggtcctttctgacaacttcataatccaccgcactcacttccttggcagcagcgccactcggcatatccgcttcggcagcctgttcagccttctgatattccagttgtttacaacgaatcagtgcacgcatgaaataggccgggaagaaatctccgtccagcaatatcgcctgagtcaggtcggcaaccgcactggagaaatcctgtaccagataaaagtcaatggcacgggcaaaacgcttcggagcactcttgtcatcgtccacaatagccgatgtatgcgcatcaatcagggcaaaatggaatttcacctgttcttccgtcagcggggcctccatatttgtaatacggatacgcttcggaagtacattcgccagattcaggtcttcaataaacttatggaaattcaccgaacgcttcacttcgctcgacttttcataataagtcaaggcaaacatcggttccagttttatgttcacattcttatcctgtacgcgtccgcgataatcacttgtatagcgttgatccgcttcagaatcatcggcaatcacaattttgcgatagttgttcatgttcttgtcagacttcttacgagtttttccttcctcgctttcgtcaccgttctcgccgctctggttttctttatccttattctgattctgggcaacgtctttgttcgtccctccattctgcttgtcaagctgagccttcaacagtttgaagtcatcctgttcggcccccttcttgtcgccgatcttcttgcgggcttccgcacgatgataatatcctgcgaggaagttcggatactggtcgataactgtcgtatagtctttgatagcaccccggtaatctcccgtctgagcacgaagcaacgcacggttaaagatagccatcatattatcaggttccatctgaatcacaaaatcgaagtcctcgatagcacggttgtcatccccgacacgggcacgaagcaaaccacggttataatgcccgataaagttattgggatcaatatccaaagccaaatcataatcgctcatagcacccctcagattattctgatggaatctggccaaagcacggtttatataattacccgcgttcttcgcgctcagatgaatcgcacggtccagatccgattccgcttctgcatagttggactgctgcaagcgaacaatagcccttgccgaccatgcgtccggatcatacttatccagttcgagagccgtattaaagtccttcagcgccgcaaccgtatccttctgctgcaaagaaacctctcccctcatcagataagcacgtgtatagcgcggagaaactttcagcaagctctccaaatcctccttggctgcgtcataatcctttttctgaatatgagacaaggtcagattgtgccacaaggtgatgttttccggatcataatgcaatgctttctgataatcctcaatcgccccgtcgaatttactctgacgaatccgtgccagtccacgaacctgatatgcacctactacaaacggattccgtttgatagcctcgtcacaatccgcttccgctccttgataatcctccaggttcacctttgccagcgccctgaaaaaataaggctcatacaaatatggcttcgcattaattacctggttgaaatactgaatagaaagcacgtagtcctcaaaatacagcgcattgcgggcaatagtcatcacccgctccgtattaatctgagcacaaaccagtgtggggaacagcaataaaactgttagtattcttttaatcattgatattttatgcttgtaaacgaaacaaaaataatgcttttcgcttacttaacagggatataaacgttttttatctttatttcacctgtttcatcttatatgaactacgcgcttttcctttcagcatcgtatttaattttcctcttatcatttgtttgcgcaacggcgaaaggtggtcgataaacatctttccgtccagatggtcgaactcatgctgcatcacccttgccagatagccttccaccacttcatcatgctctacaaggttctcgtccatgtatttcacacggatcttatttcctcttttcacagactcatgaatgccgggcagactcagacaaccttcttccatactgacttcctctccacccacttcgatgatatgaggattgatataagctttattaaaatccttaaattccggatagtcttccgaaagcgggtctaatgtaatcgtaacgacacggataggcaagccgatctgtggagcagccagtcccacgccatcggcgtgcaccattgtttcaaacatattcgcgatcagctctttcaggttcggatactccggggttatgtcctctgccacctttctcaaaacaggctggccatatacataaattggtaaaatcatactttatactctactaaaaaattaaattattctctgtcttattattaaaaacgtttactctccaaatatgtttgcagaataatagtggcacttatctcatccaccaatgctttgttttgccggtctttctttttcagtccggcttccagcatcgtacggtgtgcgagaacagatgtgaaacgttcgtccacatattctacaggaagttccgggaaacgtttcttcaatgaacgaacaaagggttcgatgttcttcatattttccgaagcttcattattcatctgcttgggcaatcctataataatccgctctaccggttcttttgccacatacccaccgataaagttcagaagttcatgcgtgggtacagttgtcaacccgtttgcaatcagttgcaacgtatcgctcacagctatccctgtgcgcttccttccataatctatagctactattctgctcatatggggtacaaaaatacaaaaaagacgcttcccgcgaaaggaaacgtctcttttattctattatttcaactgtggattattcttccacgatagcaacacggctcaacttagcgtcatcgtagaacatattgcctacaccacccttgtaatcaaccttcagttgagaagcaggtacaccgaattcgttcaccatcaggtcacgtacagcttcagctctcttcttacttaacttcatgttgtactcagcagaaccagtacccttgtcagcatatcctgtaacagtaaatgtcttttccggattagctttgatacccttagccattgcttcgatgttcatgtactctctcttgctgatgttgctcttaccaatgttgaatacaacaaccagacgtggaacgaatccgccttctttcttaacgattacttccggcttcttgttgcgtgcttcaaccaagtcacgtttcagagattcgttttcacccttcagagagttcagtctgtttctcatgtcgtccaactggctttccggtaccatcggtacagtaggaacagcgttgaatccgcgttttttgaacttgtaagttacacctacagttacaccggccataccttctttagaagttccgccgaatgcatccttcatcaaaaggccacgcaattcaaggttgatatcccaagcatccgatacacggaagcggttgatcaaaccggcattgatacctaagttttgttgatgaggttctgaccaagaaagagccacacctgcacctacgtaaggaatgaatgaataaagacgatcctcgttgtaaccgcagaacatgttagaaaggttgaagagaacatcaccatggaagttagccatgttccatttctgcttgtagtaaccgttagaatacttgccaccttttgtatacaagtcattagcactaggagcagctcccttagcttgaagaccgttgtatgcgacacgcaatccgatacccggagtaaaccatttacctacggcaatatcaagtgccggagcaatgcgttttccgaaatccgctttaccgtcgttgtcgccaaagtacatttgaccaccaacgccaccactaatgaaccaattggccccaaaacgattagtctctacagtgtaggctttaccttctgtttttcctttttcctgagcagacaggcacacagaagcccctaccattaaaataaacaataaaccctttttcatctcaatttattttagtaaataatataatgcagtttgtgttacgctataaccacaactctacaggctctaaatcttaaacaaagagatataaatctctaccctttttctttaaatttagtgcaaatatagatatttattgtaatacacacaaaaaaactcgtaaaaaaacatttcttcgtgatatttatatgggatgataaaagtgttggatagcctacaaagggtatagccaacatttttgaaagaaaaataaaagcaaaaaaataaccaatgataatctatatcattggttatcccttattttttccgctaccttaattaatataccagttttacattatcaatccacaatgaatttccgggtgaaccgacgtaagctccgccatgactggatgtgaactggagatacagatgagtcggctcatcattttcatccccccatgccacttcgtggataggcacgctttcacctttgctgttgactgtatagttctcagtcacctgcagacgcatcatgtgaggtttatattcgggacggctggtaatgtctccatacataatttcatacgtggcattattcttccagtcggtagagtgatagtaataagtcaccaacgttccgatacgcttggcataaacatttccgttggcatcctcccagcgtttctgcaaaaataaaatagcagccggataatccttgcctgctacatctgtaattttactgaaaccggtagcacgtatacgtttttccctgtcggacatcttcactttatagtcaaactgaagggcaaccggcttcttggtaaacggaatccccgtctgaagcatcttctgcgggtttttggtacccttgatcggttcgtgcacagatcccgtaaagatagagccggcagccaatacggttatattgacaagccccagtaccttcacactctccatacgcgtatccaggcgtgcacagtaaccgtctccccgtttctccggaaaaaccgacgtatttgtcttggtaatacctgccactttcgccatcacattcgaagtcgcccacggtgagccacccatattcttatacacctgatctcccttaattacagtcgtcggaccaatctcatacacattcttcgtattccctccgataatccccgactcttttatctggcggtccacccattggtccatatccccgaaggggaccatctccactttatgctgcgccatcaaagacaaggaagaaaaaaatgcaacgaagcctgtcagaaacaggcgatgaaccattttcttaatcatcaatacttatcctttcttttataaattatagttccattgtttcaaagcaaaatcccagttttcctctaccaatcgaatcgtccggtcatcatatttatacttattcttcttatatcccttcttgccgccgacatatttttcgatatctccttgtgcttcggcgaagccggggatagaaagtgacttataaatattctccgtcattcccatcgcatccgcttcaaagtcttcaaacttcacttcgatcagattgccttccggaatgaatttcttatccgattcatacttatgatacagctttgcataaatagaaaggatattctcctccaattgttcattgctgacatcctccagtttcagaggctggattgtatttgtaaagaaactgcgtgtagattcaaataccgtatacggattacgcatcaggtagataaacttggcgttcgggaacattttcaccaattctttcaccctgcccgtatgaggagggttcttgctgaggaattgcgtacccttggtgttccacaaagaaatcttgatcaatttcgtgaatacctcttcaaacactttcagttctttgtccgtgatatcatcaaacagcagatacttgtccgcatattcctgttgatatttcggcaggaaccagaaattataataggtatacggcatcatgttcgacaatgcaaactcttcctcctgcggaagatccactgccagctccatattatccgtcggacgcttgtccggcatcagccagctcatattcttcttgaagaaaggctgtccccacatcatcagatgcgggaatacggtctgataagttgtgttatacccaaaatgcttgtcgcaggagaacacgttatgtacaaaagtagttccactccgccagtgtcccagaatgaataccggatcatgttccagcggctgattggccaacaacttttcgtagcgtttatcctgcaatgcagccaacggagaaagcaggcggcacaccgctttcgtcaaccggtacttgcctttataagcagcatcaatatcacggccggcagtgattgccttaaacgttttccagtcggcacctaccaacgtattaatcggaagtttattaaattcaagtaatcccatcgttctacattttatttaatcacttttatggagagtccctggcgttccagttccttcacggctttttctatggcggcgtgatgttccggggcaatgtccagtttcgacaaatccagtacggggatgtcgtccgtggcagccatatctttcatttccacccggtcgataatcatacctacggcagaggtattattcgtaatcggatcgatcaggataaaagaaccgcaagatttattctttttataaggatcgaagaaaagctccttggcagtagtcagcacaacgcgggcgatctgattgagctgcaatggcaaattgtcctttgtcagttgtccattgtcaatggaaagatgctccatcgtgttgacatccactttatatttgatcgcgtcgatgcgggtacggctcaaattggtagtctgcttgataaagaacgatttattgatgtccatcggttcttcatccatccataccatcatcgcttcgaagttgcggtcaacgatcggcaagttgtccggatgcaccagcatttcaccacgggatacgtcgatttcgtcttccagtgtcagtgtaaccgactgcggcgggaaagcgtaatccagttcgccgtcgtatgtcacgatactcttcaccttggaagtctttccggaaggcaatgccatcactgtatctcccttgcggacaatacccgatgccactttaccgcagaaaccacggaagtcaaggttcgggcgcaacacatactgcacagggaaacggaaatccgtgaagttatgatcattatcgatatgaaccgtttcgaggaagtccagcaaagagattcctttataccatggtgtgcgttcggacttatccacaacgttgtcaccgtccaaagcagaaagaggaatacagttcacatccggaatacccagcggttctacgaatttcttgtattccgatacaatctcgttgaaccgttcctcggagaagtccaccaggtccatcttattgaccgccagcaccacgtgcttgatgcccagcagagataccaggaaagtatgacgacgggtctgggtaatcacacccgtacgggcgtctaccaagataattgccagattggccgtagagccaccggtaatcatattacgtgtatactgttcgtgtcccggagtatccgcaatgataaacttacggccattggtagagaagtagcggtaagccacatcaatcgtaatcccctgctcacgctccgctttcaatccatcgagcaacaaagcatagtctatatgttcgcctgcattacctacacgcttactgtcacgttccaatgcatccagctgatcttcgtacagtttcttactgtcaaacaacagacgtccgatcaaagtcgattttccgtcatccaccgaaccggcagtcaacagtctcagcaagtctttctgttcgtctttatccagaaaggcctttatatccagcttattatccatttccaacttttagtttttttaatcattcatttttaattgcttaaaaatacccttcacgtttcttctgctccatgctgccttcctggtcaaagtcgatcacacgggtagtacgttcgctcttggtagtcgtcatcatctcttccacgatctcttcgatggtagccgcaccgctctctactgcgcccgtcaacggccagcagcccagagtacggaaacgcaccatcttcatttcgatctgatcacgatatttttccggcagacggtcgtcatccgccatgatgatattaccatccagattgatcacaggacgttccttggcataatacagcggaacgatcggaatattctccagacggatatactgccagatatccagctccgtccagttgctgatcgggaacacacggatactctcacctttgtgtacacgggcgttgtagatatcccacaattcaggacgctggttcttcgggtcccactggtggaatttatcacggaaagagaagatacgctccttggcacgtgacttttcttcatcccggcgcgcgccgccgaatgcagcgtcaaatttatatttatccagcgcatgcagcaatgcctgagtcttcatcaggtccgtatgtaccttgcttccatgcgtgaaaggtcctacccctgcatgaaacgcttccatattactttccacaatcaggttccagccatgtttcttggcatattcgtcgcggaactggatcatttccttaaacttccacttcgaatcgatatgcatcaacgggaagggaacttttcccggataaaacgctttttcagccaagcgcaccatcaccgaagaatcttttccgatgctgtacagcatcaccggattctcaaattccgccgccacctcgcggatgatatgaattgactcggcttcgagttctttcaaatggctcagtttatattcttccatcttttttgaaatttcttcatttatttcttttctattttcggcaacaccatctccaacaggcggttgaccgactcttccagactcagcttcgaagtatccaatgacaaggccggatgttcgggcacttcaaacggtgcggaaattccggtgaaattctgaatttctcccttgcgcgctttggcgtacagtcctttcacatcccgcttttcacactcttccagcggggtgcttacgaaaacttccaggaaatcatcttttccgataatattcgctgccatttcacggatatcattattgggactgataaatgccgcaatcgtaatgatgccgctgtccagaaacaacttggatacttcggcgatacgacggatattctctacacggtcagtttcggagaagcccagattattgttgataccgctgcggatattgtctccatccagaatacggcaaagcagtccgcgcttatggagttcacgttccaatgcaatcgcaatcgtacttttacctgatccgctcagacctgtaaaccagatcatcacgctatgctgtcccagaagttcttctttgtcctcccgcgtcatcatgcggtcaaaaatcggatatatatgatttttttcttccatttatagaatatgtttattaaaagttccagatcaacgggatcaggatcacagagattaagaaagtgatgatattgagcggcagaccgatacggacaaaatccgtaaacttatagttgccgataccttgcacaatcaaattagtctgataaccgatcggtgtggaaaagctggcagacgcagccatacagatcacgacaaagaaaggtgtcggacttacgcccaactgcgccgagatggacagtgccaacggaaatgccagagccgcagccgcattgttcgtgatcagttccgtaaacaaattcgtgatgacaaacaatatagcaagtaatacatgcggtccgtaatcgtcactcaaaccgatgataaatcctgccacacaatcggccacaccggagttcaccatagccttgctgatggcaaatgcgcaggcaatcgtaatcagaatatcccacgaaatatatttggtatacttacgggcggggaaaatattggtccacgccatgataatagtagtaatgcagacaaagaaaaacatatccagcttgatatcgggaaacatctctttggttgccggcagttcgcccaccgtagcaccgacaatcatcagtaccagcaagattagcgccaaccagcgcttcttctttcccgaagtatccggatcattgccgttggtaagcagcacgaataccgaagattctccccaagtcgggataaacgtatcatccgccatcaccacaagcgtatcaccctcacggagcactacatcctccagatgatcgacatagcgctgaccgttacgtgttttgatctctttcacttccgcaccatagtgacgctggaaattgaaatcactcagtttcttgttgataccggggaaacgggctcccaatacagcttctacacgatgcagcttctctccttcctccacttcttcatcgggtacagccgtatccggacgtgcatcgggcaagagccgtttggagaaaatgaaaagatatatgataccggcaatggcaataaagatgccgacctttcccagttcgaacatggtgaagccttcatagccggcttccagaatcataccatgcactaccagattggtagaagtaccgatcagcgtacagataccgccgaggatagtcacataagaaaggggaatcaggaacttggtggccggaagttttaccgatttcgcccaatgcttgatgatcggggcaaagatgactaccaccggagtattattcagaaaggcagaaatgaatgcaacagacggcaggatacgcagctgcgctttaaacaccgtcgtcttcccctgcggaagcagtttcttgatcacttgccctaatgtacccgactgacggataccttcactaaccaggaataacaaggcgacggtaatcattcctttattactgaaaccttcaagcatttccttcggagtcagaatgccgacgcacagaaataaaaccactaccgaaaagagcaccatgcccggccgcatcttatccgcgatcagggcagccatcattcctaataaggataatagtacaaatacaatttcaaatgtcatataaacattaattagcgttctctttttgcttcaacgataaaccacggattcagcagatcctctttgttatatcgcaaaggttcctccttccctgcctgatatacttccatccctgcggcacgggctatcgcatgtccggcagccgtatcccattccatcgtcggagcaaaacgcggatagacatccgcctttccttcggcaaccagacagattttaatagaacttccgcttgatatcagttccacattgccgtgtttcttttttaagtctgcaatatatgtttcagtttcaggcgtcaggtgtgaacgggaagcgacagcaataaaatggtcgcgcgcatccgccaatggcatccgtttcgatttctcaatcatctgctgtaaggtcactccctcgtcttccagaccgacaatgccggaacacttataggcacctgtcccctccactgcaaaataaagttctttttttacaggcacgtaaataacacccattacaggtacagcgttctgcaccaaagctatatttaccgtaaattctccgttacgcttgatgaactccttcgttccgtccagcgggtctacaatccataaagtatcccagcctcgccgcactgcatagtccatatgctttccttcttcactaagaaccggaaaaggagtttcattcaaaatggccacaatcgcctcgtgggctttcctgtctgctatcgttaagggagagttatccgccttcctctctatttcaaaatccgacttcggatcttcatagatagaaaggattttttcacccgctttcaacgctgcatcgatagcagccattacatatttctgtttcataatgacaaaagtaaaaactttatttacgaaaaaagtttcccacctgctatttataacttcttttagtagaatgataaaaatttctaaaaaacgaatttacaatgtgtaacaaaaaagcagtaacttcccagttaccgccttcttatttcgggaaaacaggttatccatcccgatatatattaccaaaaagaaatcaataaatacgatacagcaaccaagctccctggaagtctgtacgactcgggtatttagccttgaatgcgtcacgtgcatcgacagcagccgctttgtcagcgaatgagcttacaatcacacggtacattgctttttccgcattgaatgcgattgttgcgttgtaaccttgtccgtccaaccagtctttcaagccttcagcattcgctttcacaccgaagctgcctactactacgctgtaatccttcaatccgtcggtaccggaaacgactgtcaccttttcctgacgaacgccggttgtatctgtagccttaggtgttgtcacaggagctgcaacaaccggagtcacttctaccggagcttccacctgcggttctgccaattcttgctgttttgctttttcgtaagcttttttataggcgctttcactggatttacaagatgcaaacgcaagcaccatgcatactcccattcctaatacgaccaattttttcatatccaatattctgtatttaattaataattcaataatcttgttcgttcacatttagttttcgggcaacaaaataatagaaattttatcatccggcaaagaaaatgagcgaaaaaacgtctattctgccttcttcttataagaaatagtgcccgttgcctgataagtcggcatcaaaagcacctctgcaatctgaatatgcgcaggagccgaggcagcataatataccgtttcggcaatatcgtctccggtcagcgggcggattcccttgtaaaaattgtcagccgcctgcttgtcaccacggtaacggaccactgtaaagtttgtttccaccatgcccggtttgatattcgtcacccgcagcggcgtatccaccaagtctatccgaagtccgtccgaaagtgccttcacagcagctttggtggcgcagtaaacactgcctccgggataggcggcatctccggcgatagaacctatattaataatgtgtccgcacccccgttccaccatgcccggaactaccagacgtgtcatggcgagcaaacctcttatattcgtatcgatcatgatatcccactcgtccagactaccttcgaactctttgtccacaccgatcaccagtccggcattgttaatcaatacatcaatcgatttccattcttccggcaacgcttccagtgcggcggcagcctgcttccggtcgcgaacgtcaaaaggcaacacacagacctgtattccatactctttttccagttcagccttcagttcttccagcttcgacactgtacgggcattcagaatcaggttccatccttccttagcaaatttacgggcgcatccttcgcctattccgctgcttgctccggttataaaaacaatcttcgctttcattatgttttgaattacaatattgaatgacaaaagtacgccttaagtctcatttgttagtccaaaagtctagttaaataagattaaaccataaaagaaatcaagaatgataaaaaggaagtactttttttctgtttttgcgaacaacctttggagaaaaatgttatatttgttgtatcataatcattttaaacagtataaattatgaaaggattaaatgtattagcagcttttctgggtggtgcagccgtaggtgcagcccttggtattttgtttgctcctgaaaagggagaagatacccgtaataagatcgcagaaattcttcgtaaaaaaggaatcaagctgaaccgcaacgaaatggaaaatctcgttgacgaaatcgcagctgaaattaaaggagaaataggagaataagtaagtaaaggactaaaacagagcgaccatgtttgcagacgataaaagtattgagaactttcaacagttgttttttgagttcaaaaagtatctggaacttcaaaaagaatacaccaagttagagttgacggagaagttaaccatacttctttcaacgttaatcatgattgtagtacttatcatccttggcatggtggccctgttttatctgttatttgccctggcttatgtattggagcccctggtaggcggactcatggtgagcttcgctatcattgccggcatcaatatactgatcatggctttagtcattattttccgcaagcagcttatcatctccccgatggtaaacttcctcgctaacttgtttttaaccgattcaaaataaatgaagttatgagtgcgcaaacacctgccaaaattacattagaagagatcacccaacgcaaaaagaagctcttgaatgagattcatgctcaaaaacgagccatgacggccaccacccgcgaaatattcgccccgcttgcccccgccactaacaaagcggattcgctcatgcgttcgttcaataccggtatggccatctttgacggagtagtaatgggtatcaagattatgaaaaaagtgcgggcgtacttcagaaatctaagatagcaatccgggtaagacaagggggatcagagtcctaccccgtcccatctcatcactaccacccattctgtcggctgcccgtttccgtaaagccgatgtggaatcgtaccgatcaccaaatcacaatgggctgcaaatacattcttcaactccttcagcagtgcattcaacagaatttccagatgtatctcatccatgatacagctgacgacacgcacgtactgataaacgtgtaaatccttcccctgccgcatggcactcacatcccttccggagatatgtaactcatcttccagaaaagaatacgaaatcgatttgtcgatattcatcaggttcactaccatacttcccaaaaactcataaggtccatgattttcttttgtcatgtttactttttgtttaaaatttaataaaaaatagatatatatttggttattcaatctgtttcaacctatgaaacaagttctaactccccctcctttacctttgcacccgctaccccgatagtgggatagacaatcataaaacatcaaaatcaaatgcaagtactcgaagaaattaaagtttccgtttacgaaaatgtgtattccaaaaagcctaaaatcatgtctttcctcgaagtcatctttatgtgtattcatccggtttatgcttccatcatccaatccatccggcggtaccatcaggaaggcgaccatgaagccgcccaaaaactaaaaagccagctcccctgcttcactcctgccggtactttcgacggagcgcatgccatccgaaatttccggttacccagtcacattatcggactcgactacgaccacgttcccaatcggctggagatcatccgtctttgcgctgccgaccctcataccgtagctgctctggaaagccctacggacggcgtgaaaatcttcgcctatgtggaaggcatcgaaggccgtcaccgggaagggcagctactggtcagccgttactacgaccagctgaccggcctcaccagcgatcccgcctgtaaagacgaaagccgcctgtgttatttcacctattcaccggacggatacgtagccagtctctatcagtcattcgttctggaagcagctgtagaaacacaaccgttccagccgacagcagaaaacctcccctctcctccgctacctgcaaaagcaaacgaaacctccgagaacttctcagaagaggaagtcagcttgttcctttcgtcctacattttcttaaatccattgaccgccgggcaacgacacaccaatctgtttaaactcgcctgcgaagcttgccggagaagatattcgcaagaaagcatattacgcgggattacggtttattttgagcactccgactttcccgcacaggaaatcaggagcatcctacaatctggttaccaaaaagttacctctactccatccgtctccgcctctccgctttgctcttctcctcataaggacaaaatgacaaaagcgacatatagcccatctgaaaacgtctatgaagcagatgaagcgtattggcaaggcgaagaattcagaaaagaaacaccctgttttcccaaaagcgtgtacaaatatctgcccgatctgctgaacgaatgtatcctcgaagaggaaggtgatcgtgaacaggatctttcctttctctccaacctcaccgcattgagttccgtactgcccgccacattcggcatctataatcacaaaaagtattcgccccatttctacagtttcggcattgcccccgccgggagcaacaagagcattgcgcaaacaggacgttatctgctggaagaggtccacgactggatactttccaatagcgaacttcagcagaaaatttataaccataagtatacccaatggaaactggactgtacttataagaaaaaggcacatgaagagtgtcccgaagagccggaaaaaccggcttacaaaatgctttttctccctgccactaccagctacagccgtatgcagatccaaatgcgggacaacggtccgcaaggaagcatcatattcgataccgaggcgcagacgctggctacagccaatcatctggattgcggtaactttgacgatatgctccgtaaggcattcgagcatgagaatattgattcggctttcaagatcaatggtttagcccccatttatatccgttttcccatgcttgccatgttcctcaccggcaccccgagccagatggcttcactgatagagacttcggaaaaaggacttccgagccgtatcatgctctacactttccgcagcattccgaagtggaagcccatgggagatgacagtatctcgctcgaagagtctttcaagccgctggcccaccgcgtcttcgagctttatcatttctgcaagaatcatcctgtattgtttcacttcagccgttctcaatgggattatctgaatcatacgttttctaagctgcttgccgaagtggttctggaaggtaacgatgaccttcaggccgttgtcaagcggtatgcctgtcttgtgatgcgcatcagcatgatccaggcacgcatccgccagttcgaggcgaatgatggcgcaccggatatctattgtgaggatgtagatttcgatcgttctctccagatcgttctctgctgttatgagcatagcaggctattattgtcttccatgccgtcttcccagctccatccgttgaaagatccgaacagtacacggaagttcatcagcgagttgccgaaaacattcactaccgaagatgcaatgcagatcggcgtaaaatacgatttcagccgccgcaagatcagcaggctgataaaatcgttcattggcgtcaaaatcaataagatatctcacgggaagtatcagaagatctcatgaaatagtcctatctgtcatttttgaccttttgtccttttgaagactctctgaaaacattgggaagtttgaaaaaaccttctcaatgatcggatgcaaacattgggaagattcaatacaatcttctcaatgttttttccttttatcagtgcgtctgtgtgcgtcactgtacatcacgggcacttgctcatgtagtatctttgttgtgtaatcggttacaggtaataagtattaagtaataagtattaagtattaaaaattatggcacagaattatgttgttatggctcgcaagaacctgttgaaacctagtgaagctcccaagtattatgcagtggcacgtagcggacggaaagtgaccgtcaaggaggtctgcaaacgtattaccgaacgttcgtcttattcaaaaggcgagttggaaggttgtatcggagagtttctactcgaaatcgtcaatgtactgaatgaagggaatatcgttcagatgggcgatctggggaatttccgcatgagtcttaagacggcaacggctaccgcaacggagaaggaattcaaggcatcgtgtatcgagaaaggtaaagtgcttttctatccgggaagtgatctccgcaagttgtgtaaaacgctggactttgcactgtataaaagtgacggtaagcccgattcgggagacgaaccgttgccggacgatggtaagggcgatcagcccggcggtggttcaggtgacgatggcgaggaagctccggacccgactgtttaatcaatcattatttactattaaagattaaaattgtatgaaaaagcaagtttggaagaatattcttcagttcattgtgacaattgcaacgtctatcatttctgctatcggggtaacgtcctgtacagctcatctgtaatacatccgcatggaaagttctaaagatgagtatctcccgagagagattaagttgttggtgattcattgcagcgctacgcgctgcaatgtttccttccctgtagaacggcttcgagaatgtcatttgcaacggggttttcgtgatattggctatcatttttatatcacccgggacggagttcttcatcattgtcgtcccgtctccgaaatcggtgcccatgtgcgtggatttaacaggcatagtatcgggatttgttatgaaggcgggctggatgaaaatggcagaccggcggatacgagaactacggcacaacgctttgctctgctcgatctgttgacgattctcaagcatcagtatccggaggcgcaaatccttggacattatcagctgagtgctacaatccacaaggcatgtccttgctacgatccgagaaaggaatattcaggattataaaaaaactacgggagatagcgaaagtgctgcctcccgtagttttttgttgaatgaataaaaaagatttggggttacaaatctcccggcttacccaaatagtaggtgattaaccttacttcccgcacagaaaaagctttcgttttcggatgaaaatccgtagaaagtatctcatccattaatggttgacatctacgcatccagcgacgaagtttatttactgaagcgcgaacagttatatcagggaaatacatttgggctaagtcttgtttattgtagcatttcactacaaaatccggttgattcattgtctctttatacttggtttataagcaataaagatacaaaaatattcacccatttcctacgtttttttcatattttatttcaaattcactagtcttttctttcacttttggtctgaccatatccatagccgtaaccataacgtttgccatatccgtaatgcttgccatacttaccgtagccgtagtaataaccgtattttcgcttcttcaagtctacgccgttgatgacggtacaaagattaggcagcttcttctcaaaagacagttcattgatcaatgtatattccgccttatgagtgtagtcagcacggcatacgtaaactgacaagtctgctacacgacctattaataaggtatccgttaccatgccgataggagcagtatcaaggatgacataatcgaagttcttcttcaaggtttctatcgctctgtccagaccgttacgagccaacaattctgttggattaggaggaacagtaccacccggaagaataaacagattcttatttacatcagaaggttgaacaagctccatcaaatccgtttcaggattggaaagatactgagtaatacctctctccttattagagagctggaatactttattcagtcctggcttacgaatatcgagcccgacaatcaccactttctttcccaaaagagaaagactgatagccaaattcgacgaaacaaacgattttccttcaccactgacagttgaggtcacaaggatcaccttctgatcattatctagcataaactgaagattggtccggatattacggaaagtttcactcatcagattattcttattctcaaagacagcgatagagccattcttatcattcttctcatcagttaatggaatatcaccgacaacaggaacactcgttagtttctctacatcggcacgaccttcgatcttgaattttgtcagttcaaccaagtagatgataccaaccggaattccaacaccaagtaccaatgcaatcaaataaatcatagagcgtttgggagataccggaatatcgtcagctatcgcttcatcaatgatcttcgcattattcgcagtagcagcaagagcaatcgcattctcttcacgtttctgtaacaacatcagatacaatcctgccttgatctcctgctgacgggcaatacttacataagcacgttcctgtcccggagcgttgctgatacgacgggaataacgactcgcttcacggtcaaggctctctttggtaatcatcagtccctgcaaggttccttcaagagtagcctgcacattggctttcatggcacgaatacttgtatctagattcacaatcgtagggttattctctgttgatgtacgcaacaggcgtttacgctcaacaagcatctcgttataacgttcaatcgcaccgatcaaggcagcatcctgcaaacctacattacttggtaatacttcatattcattacctctcaaatatttacgcaagtcatttaccaggctgatttgagtacggttctccacacttttcttttcatattcagcattaccggccaaggctatctgagcttcactcgtcaagtccgtgataccggcatcacgcttgaaagactccagattagcttccgtactacccaattcttttgagataatgccaatacgttcatcgataaattccgccgtcttctgagcgatctcgtttttatcattgttcgtattgcgattatacatttcaagcaactggttaataaaatcctgcccacgctgcaaactggagttcttcaacgaaattacggctacagaagtagtcttagaagtaggagcaatagacaggcttttacaatagtctcttgccactctcatcggtttgtttattgtcgcagttatatgacgtacgtccttctctatccgaggaactttcgttccatcctgtaaagttaccgaatcaacttcctgaaagaaagccaatgtaccttcatcagtcggaaaaatagcaggcagcttttcaaaatgtttctgataacccttttcacctacagtcacattcacatccatactaccttcaggctgtaaggtcatctctactaccagcgaagttttcagtttttcagcctcttgaggtgtcaagcttacctgcaccggagatgtcttatatagacctttagcaggaaattcatcctcatctttataagttatatacagtcccaactgattaaccacctcttttaccagggttttcgaacgcagaacctccaactcattatcaatatttttagaggaagtcatcaggccgcttaaacccatatcctccaattccgaagaaagtcctgcacctccacccttcttctcgtcttttatcagaactgtagcggaaatattataaatgggggtagcccaatgcaaataaaaccacgcgccaacaaaacatagcaacaccgcacctacaaaccagggccagtgaatgatatatttaaaaagaagcgcccggaaatcaatctgatcctcagccaattcacgttccttcacgttttgattttcttccttcataactctttctttttatttcaagatgttaaacaacaaactggcaatagaaacaaggatcgaagtagcagagaaccataagcttgtactagttccgatatccgaattccttgctttcgccttattcggtgttacgtaaataatatcattctgctgcagatagtaataaggagaaagaatagtctccgccttgttcaggtccaacggaataatttcctgcttaccattggcattctcccgtatcagcttaacatcatcacgcagaccgtatacagtcatatcacctgccatagccaaagcttccagaatgttcaccttttcattggaaatagtgaatgtaccgggacgggcaacttctccaatcacagaaatcttataatttaccatacgtaccgttacaataggtgtttctgttatataaggtttcaacttttccacaatcatttgttcggtagccttctttgtcaatccgcctacatgaagttcacctaataccggaaagttaatattgccttcattatccaccaaatattgctgcagaataggttgggtagttgtataactcaaagctacattattctgcgtagccactgtcagattaaaaggcgcagccagttcaggactggtacatgacactacaatagtcaacaaatctttgggcatgatctttgcatcatacaattgtgcatcctgagtactatacagtaccacttccgcatcctgtaagtaaggtacttttttataagactggcaagctgtaaaaagcaaagtcaacaacaatattaagatattctttccattcaatttttccataatatataaattataaaatttagacacctttcaaataccattcataaagacgctcgattccttcatcaatctcaaccttatgatgccagcctaaactgtgtaacttcgatacatctgttaatttacgcattgtaccattaggctttgaactatcccaaagaaggatacctttaaagccaatttcctccataattatttcggcaacttcacggatactaacttccttacctgtaccaacattgatatggcagttacgaatgtctctactgcctgtaacataagtatctttgaaatcaacgttcaacagtacatgaacgctcgcatcagccacctcttcactccataagaattcacgcataggtgttccggtcccccaaagtgtaaccgattcagaagtaataccaaattttgccaatttatccaatatttcagcatcagaattactaccagtcacaccttccacaggacgcaagtcaatatctttacgaactgacttccaatttccttcattcagacatttagccagatgaatcttgcgaatcatggcaggtagaacatgactgttctccaaatggaaattatcattcggaccataaaggttggtaggcatcacggcaatgtaattcgtgccatactgaagattgaagctttcgcacatcttcaaaccagcaatcttggcaatggcataaggttcattcgtatattccaaaggagaagtcagcaaagcgtcttccttcatcggctgtgtcgcatcacggggataaatacaggtactgcccaaaaaaagcagtttctgtacattatgacgaaaactctcaccgatcacattctgctgaatctggagattctgatagataaaatcggcacgatactgcaagtttgcaaggataccaccgacgtgcgcagcggcaaggacaactgcatcaggctgttcttcatcaaagaattgttttacggccacgccatcaagaaggtccaactctttatgagagcgtcctacaagattcatgtaaccacgacgctgcaaattattccagatagcggaacccaccaagccatggtgtcccgctacatagattttcgtattcttatccattcttattcttctctattcatcagttctttcatgtgaagcttcttcacaaacttcatatcatgcgataccataatttttaccagttcggagaaagaagtcttggtgggattccagccaagtaatgtacgtgctttcgtaggatcacccagtaactgttctacttcagcaggacgaaaatacttagaatcgacttcaaccaatacttttccggtcgatacatcaatacccttctcatccactccttcaccgtcccaacgaagttcaatgccgacttctttgaaagccagtgtcgtaaattcacgtacagtgtgatattctcccgtagcaattacaaagtcttcaggagtgtcatgctgaaggatcagccacatgcactcaacatagtccttggcgtatccccagtcacgaagtgagttcagattacccaaataaagtttgtcctgaagcccttgtgcaatacgggcaacggccaatgttatcttacgggttacgaaagtctcgcctctacgttcactttcatgattaaaaaggattccgtttacagcatacatggcatagctttcacgatagttcttggttatccagaaaccgtattgtttggctactccatacggggaacggggatagaatggagtagtttccttctgtggaacttcctggaccaatccgaatagttcggaagtcgaagcctgatatatccttgtcttcttctccattccaaggatacggacagcctccagcatgcgaagtgtgccaatagcatccgcttcggctgtatattctggtacatcaaaagatactttcacatgactttgtgcggccaggttataaatttcatccggttgtacttgctggataatgcgaatcaaagaactagaatccgtcatatctccataatgaagattgactaaacgctcctttttcatgtcacgtacccactcatctaaataaagatgctcgatacgtccggtattaaaagaagaagatcgacgaaggataccatgtacttcatatcctttttctattagaaactcggctaaaaatgagccatcctgaccagtgattcctgatattaaggctacttttttcattttattcattaatcaaagtttttattttacacacaatatatactgcagcctcatatgaccgaaagatatttatataatggggcagcatattctaaattcgataaaaaagagtatttaacaactagtataattaaatcaaaacataataaaaaaagttttgtcaaaactcccaaattagaagattcatctttgctacagtgatgtgtgaaagaagttatctattttaaaaggaagttcagctttgtcaccatctcttgtggtcatctttctatagcaataactttgaaagtttggaatatgagttttatatcataaccaaaactgacattctgtacatattccaaatatagttttatcttctcctgcataatcacattgatgtagtagctttctggatctacagctttctccattaactcattctcgttgcgaaactttattgatgcaggatcggtgatgcctgggcgaacatctaacacatgcatctgttctggtgtccagtagtctacatagtgtcgtacttcaggacgaggtcccactagactcatatcacctataaatacgttgatcagttgaggaagctcatcaaacttatacttacgaataatataccccgatttcgtcacacgaggatcacgtcctccaatagtgaccaaacttcccttgtcagcccccacccgcatagagcgaaacttaaaaatacgaaaatctttatttctttttcctacgcgcacctgacagtaaaacactggtcctttcgaatccaacttaatccaaattgctagtactaaaaacaagggactaagaaaaataagcccacagccacttactagaatatcaaaaagtcttttcatcacaatgactttacaatatcaacaaaattctcgataacataatcgacatcttcatctgtcatacgggtattaagtggtaatgtaatttcattttcgaaaaggtgatacgcattagggaagttagcgatatcgaatcccaatgctttatatgctgtcatcataggcaggggtttatagtgtacgtttgttgcaataccacgttctgccatcttttcaataacaatgttaacctcctcacgagaatgccctgacaaacgtaccatatagagatgaccactaccttcccaatcatcaccataatgtttgagagtagtaacattcagatccgcgaaagctacatccattttctctatgatagtacgacgacgctccagcattgcaggataacgctcaaattgtattaagcccatagcagccattatatcagtcatgttacatttataccaaggaccaatgatatcatattcccaagcgccaagctttgtctttgcaagagcatctttattttgaccatgaagtgagaacaactgagaaagtcgatacaaaaactcattccatgtctcgctttcaataaatggcacaggcgaaccacaatatacctgctggcgttccactttttcttgcccaaaaggcaggttccaagtaagagcaccgccttctgcagttgtaaagttcttcactgcatgaaaactaaaagaactaaagtctgctatctcacctgccatcttgccatgacgatttgcaccaaatgaatgagcgcaatcattagacacaatgatacgaccaatcttcctctgtatatcgttactgggaataaattttgctttaatctcaggactgtttattacctcatagattttgtccagattagcacaaataccagccaagtccacaggtacaattaccttagttttctctgtaatagcatcagctaatttgttgtaatccatctccatacaatctctttgcacatccaccatcacaattgttgccccaacatgagtaaccacagatgcactagcagtataagtgtatgcaggaacaatcacttcatcaccaggacctattccaagtagatgtaacaccatttccatagcggccgtagctgaattcaaacatacagttttttgcgtgtgtacatactcggagatttttttctccagtttcttggtacgaggacctgtggtgatccatccagagaggatagcatcacgcacttcatttgcctcagcgttagtcatgtcaggcggactaaaaggaacattacgcaattgtatattcataatatgtttctttaatattaaaagtttcttatattttttttagaaaagcatgctctttaaacgattcaaaggagtgaaaggaattgcactctgccccattattatccagattcttccgcaactccatacccagcaaatgcatctgttcgttccgtaaccgtatggatttaatataccctaaccactccatcagtagatataatgatatattcaacttttcagaactaatatcccccttaagtgatgttttcttgatgaggatgtctgagagagatagtcacgattactaaaaaatcgttgagtctgtttaaataagctattcattatccctttacatcataatgcttcacatagaatatcttcttgaaagtattccctaacacattcatcagcacccagtatgtagccctaactggatgcatctcctctgccacatgaaacagcggataatgtgcccatatacgcttatacagaggtttaggagtaatagatacagcacgtctcctatagcgagccaaattctcctttaacagatagcaaggcgacttctgcactaccttcagccacatggcagtatcgttattcttgcacacatccttgatttgaatgagcccaattttctccgcatcatacattactgccaaacacccaggccagcaacaagtatacatatcaaattcatctactcgcttcttgccactaacgtacaccccgaggtcgttaccttcctcactcatctctatgtactcatggtaagtaaacgcataattattctgcaccatgaacttcaactgacgctcaagtttctcaggaagccataaatcatcactgtccaaaaatgctatccagcgcccatttgcacgctttaacgcattattacgagtaatggcagcacccgatctcttctcgttacactggtacttaatacgtggatccaaattagctagtggttctaccacaaggtatgtattatccgttgaacagtcatcctgaatcaataattcccagttttgatatgtctgagcttgaatgctataaatagtctcgcaaataaatttcgcacaagcccatgtaggtgttataattgatactaatccgtaattctgcataaattattagtttatatcgactattgctattcaggttagataagtcacttactcggccaactgacgttttaatatattcttagtcctcatctaatcccccatcacaattgcaatacactttttctttctcaagtcattacaatattctgatcttcaaattactgtattttttttacagaccctactgaatataaaatgccctacaacaaccttgggatcccctttacaattaacgagagaatataaaaattgggattaataataacaccttcatcactcttcagaataacatggaatcaatgtccaactcggattatatatatctatattacaatccctattcagccatggctttggacaaatcacacgatcgaccttttcattaaggaatgctccccaccaactgaatgagctattggcaattatcaaatccttacaatgagtcatcaagaacatatcccaacagctatcctgacctttattgcccgatataaatacaatgcgattatcacttacaagaggagcaatattctcttgacaccattgcatatcattgctaaagatgaagaacacatgctttttcccatcactcaatatctcttttatccccttctcataataatccaatccacagattccgcgaaactctggttctgcaaggtaatcacctcttcttacatggatacctacagaattacaagcttccaaattagagataagcgccgcattatattggttaggtcttggatgagcatataccttttgtagttcttccttaatgtccttgaaatgattataactctgccaatatccctcaaaatagccatcccctttccaattcaaagccttatcgtcatatgaatagttcatactgtaaggaggtatgtactctttttttctaattggtaagaactttcttcccaatcgtgacaatacatagttaggaatccaatacgaaaatttcatcaactgtcttacaccggctaccggtaatatcgcttttggaaaaaccttatcaatctcatatccattatgcaagtttatccccttgaacttcttaaaaaagatagtgttgtagtgttgtatgtctacaaacacttcttcttgtggatttctatacttcaatgccattgcaaaagcgtattgaaacatctgattccctaatccgcctgttatattcactattttcataattacattttacctaataaaaatcgtgaaaacattctattatttaacaacagaagaactattaaatatgataccagtgtggcgacaaaaaaggttattgttatttgaaacattgcgctagtattgggtataataaatgtaattaattgacataatggtattattaatacatagtgaacagcaaataagcttaaaggcatattaccgcaacaaacaatcattctctagttcttatctgaactcaaatattttgtctcaagagatagcccaaatgtaatttccaatgtttcaaagcctctcccccttttattgccgtacaacaaaaaagaagaataaaaaaactaataacattttcttttacgacacatttatcttaattttaaatctacaagcatacttataagaataaatcaatctccagtaataataaaactcacattgaccatccgaaaaacaatataaaattgcatgactaaaaattactataagtataagatacctcttcaggtcatctacctatattaattatttagtttttctatttcaacttaaatataaatctatgaccttacgagatatccttgaaaaatccagatagtcctgcaacgataaacgagtattatccgaatattggttgataattacattacaaatttgttttgccgcctcttgtggatttcggcttattatacatgagttatgcaacccttcaagctgttttgccgcatcgcctacttccacactaaaaaaagatttattcaatgaaagaacctcacgaataatgtttggagaaccctcttcatcagatgtcaacaatgcaaactcacaagcattgatataataaggcacttcatcaggttttacaccacacattatcaataaattataatcggggcctaattctcttatgatattctctgcgatgtcacgtcttttaatgctagtattactaacatcagaaaacagcacatatttcttatgttccaatcctagatactcctgagctatttctttgtctactatcataaaagtagaataatcaacacctaataactgaacaaaagccttcctagccatttgttttgctaaataggagggcacataagtcatcagctccctggctacaaatccacacttatcaaacagttttatacttaaaaaagaagctttttgattcaaacgaatcttcaaacgttccttccagccctttgctgtttttagtgcctttgcatgtatatcagtaccgtggaaggtgataaacttcttgcaatgaaccccaatcaaaagtaaccatattatcaaagcatacaatcctccaaaatgtatatgaacaagatcatactgcttagacacctttcttattattctcaaagaactcaatgaattataaaatggtaaaaactcaaccttctctatccgagaatcttctgaaagagcattcttcatcctatacatgataggattaccaatacctaatttattaggatgctgattggagattaacaaaattctcatttctcaagaatcttttgaattgatttctttataaatgcaagtcctttacaaattggattcttttgctgttgtttccaacatttggcatactcatcaaaaattggttctccagtaagttcatacatagcttgcatctgagccacatgaaggttgtgatagaaagggctcgcaatcaaaccatccatactatacatgctccaatatgtacatttgaacatcggaagcaccttgattatcgtttggagagttttttccattatctttttatatataccttcatccttactgacaagcacgtaatcatataatccccaccaagagaaaatacttccattcattaccatacctttaaaggtatactccattagatatacatcatcactttcgtatttagaagttcccccatccgtaagtggtaaaagcataaatgccaatgctttttttgctgcatttagataatcagtcttccctgtgtatttataagctcgaatgagaagagaaacaccttcaccctgggccattgcactatacggattttctggacagtaatgtgagaagttattccaacgtcctttttcgtcttcatgttcaatagcccaatctacacactgcatgaacttacgtacataacgctcgtcatgcgtctgcaaatataaatcatatgcgcccaaaccatactgaaaaattgcgacagggaagaatgtgaacttgcctcctttaagattaagtttcggtaattcatcactattcaacagttctggcacctttgttaccttctctgtcatattattatagtaccccttaatctcatcttttagaaagcacttacctatatcttgattcacatgccatacacttttacctgaaagcataaggtaccaccgttttatttgatgcattgcaactaccattataatagtttcatgtatgtgagaccttccccacctctctttctgtagagttcaaacccattacgttcataataccttcgtgctctaagattattggtctcgaccgagagcaagcacagtcggcgtccacgctccttcatagctgccaaaaacttttccatcatatcttgtgcataccctttacctctacaatcaggtaacacgcagacagagagtaaatcgccccgctggctatttaatatttgttcatatttatcattcactattacccagtcactgaccgatggtctgtgtttgaaacgagcaagtactttattccatgttggcttatttccagttagcattaatagcattgttttccatatcaccttaatgcgattgttatgaaggaagttttgcatctgatcatctttatccatatagtatcccatacagaaacccacgatgcctttctcttcatcatctgccaccacaaacagttctggattatctttcatatactctaaataaaaggaaatcagcaaatcacctcctcctataaccgactgataatgtgataattgagaggagtagctatttgcaaagcatacacgatgaacatgtacaattgcaggtagatcttgcgttgttgcttgtctaatcatattcaagactatttgtatctatataatctacgaatgcttcatttatacaaatttaacattcttaatttgttctgcaatgtgtttgatatgctcttctgtattatagaatttctcgaaaagactatcaaactcagtatagacctcttctgcttttgtatccttctttgatacagcgagtatcttatcaagatcgttctgaccattgagaaccactgcattcttagcattacacaaaatctcctcgaagaaaccaactgtgtttgacacgataggaatgaggccggcagctatataattagacaacttagtaggcgtcgccacatagtttacaggagactcagctctaactatgaaaccatatttgcaagatgccaactcgccaaccagcttatctggtgtcacatacttgacctcgaagttcttgacgcccttttctgtaagtatctgctttgctttatcctgatcgcctgtaaatactttgaagcaagcattaggatttttctcctctatcttcttatacaattctactgtctcagggaaacactgccaaacagacaaccctccaacataacaatatacctcattctcgtacttagctggcgtaaagaacagctctttggagagttcgttattatagcaaggcatgatatatgtcttataagagaagtccttattatattttctcttataatgctcatgcatagagtcagataccatgaagacatacttagcttttgccaaagctatgcgctcaattgtcgaaataatgaattttcgccaatgagaattgttacgcataaagctctcatctggtgaagagccttgcacccaataaatgatgttcttgaaacccttcgaccacaactttaccgtaaggtaatgtgaaatgctgataataatggatttcttatcaatattatcaatctcctttattgagatagcttcatacttaaaataacctgctttttcaagtcctttaccaataacatctgcataaaagtcctgcacagcagcctgatcttctattacataatacacttgtttcatcttattatctttttaattgaagctatggcattttgaactaagctcgaccctatagtaatactctggaaacatctctaataatatttttttacacaataattcgtgtttgctaacttattatagccgatattatcaatttttcatatataccaagccttatttcgggtgtgttagatgaatgcattatattcctattgtatctatatgcatcggctaatgttgatattttactaatagaaacatcttctaacatattccataactcttctttttataatcatcggctaaacttactgcatacaaccagaatataaaatatataaccatacctaatgtcattggctcaattgtgaagcaattaacacataggaagagaatgctagcattagccattttgcatttaaaacccacagatttcaagggtgaaatcataacagaaaggaacaaacataggcctactatgccgtagtcgcacaaatgagcaagatagtcattatgaaaacctctaccggcaccaccattataatttatatatccaagagcataacctccttcatacccattaccaaatatccatctcaaagggtttatttcattattaaatgcgttgagcttgttctcccaaatcgtcaagcggccagaacctccacctgattcattttccattctcatctcaattatctcaaaataatcattattataaagaaagacgagaaatgttgccaaaaccatggctaataatactttatatattattttttgatcagatacacaaaataaatataaaattgaaatcgccactgacaataatgctcctcttgaaccattatacaataacacgataaacgatacagcgacaacccctgcaaaaactaatctaaggaagaattttgagaaattttgcatcagtaaattaaaagcaactaagcaccccatacctataactccccccaaataattagggtcaacccacataacacgttcttctgatgtatccagcattattgtatatgaccgatccgtgaacaaaaattcaaatgaaataactactgatacaataataaatagatacgaaaaaaagagtgaaaaattaggcatttcacttttttgtatatatctagcaaagagtaaaacagtaagtaaagaaaatccatacattgatattttcatggatgtaacaaagtctacaattaagactaatgctgatagccatataatactatgaggaagaggtatagcaggttttttagattttgatatacaatagacgataaaaaacacaaaagtataataatatagttctgttggtataaaaggtgtaccaatgccaaattttgctattgtaaataaaaccatcattacaacagggaataatttgacattataaaaggttataggaataatagcagcaacacaatacaccaatctaaatgccataggagggtcacctacaccaaataacggggtaagtaaacataataagactatgtaatatatagttaacaacttattttttaagattatccccattgtttatgtattattatcatttaaatggaagttaaataatggctgtcgtaaaccttttgaacaaattacgcaagaatactttcatatagaattatgtgctgatctgcaatatctaaccaactatcaatctttttagtgattggtatttctgccttatcataaacctccgtaatctttttctcaagtattttgtactctggagaggtataaaataatccatccattgtctttgggtataatccgcacctgtttgtacatagaacagctgtgttttgcgacaaactttctaatgcgactaaaggatacatttcagagaaacttggtataactgtcatttttgctttttggtagatagccttcattacttcacgatctttttctgctccccaaaaaactatcgattctgatccctctgctatttttttacagttctgagtatatgattcgctacctattcctgtttctcccacaattaacagattatatttttctttttttgcaatcttaataatagactcttgatttttattgtgctcaatacgaccgactattaagatataattgtctaatggaatttcaacatttgaacaaggttgtgagaaaaatgattcatcaataccattcccaataattgaaatattgtttaaatcaacattgaaaaatcttgcaaatcgatctttttcaaattgtgtcaatgtaacaagatgcgttgcagagcttattaattcacgcatagatttatgatcaactaacatgtaaggaagatttgaaataagatttatcatcttcaatttattatcagacaattttctgcttccaaacataggtgtaatgactactgggattcctaatgatttagctgtatggcaaataggaataaaagctgaagatattgaatggaaatgtacaatatcataatctctaatgtttgttaaaataagattataccaatcaacttcaattcctcgcgactttaggccatcaaatatttgtcttacttgatgttggaaaccaccgatttccaatgggaacgccattggcggcacaaacaacactttcatgaatctatgtaaatttaatacaacgttgataatgtaaacaattataaaagatacacaagacattctgcttgtctcgttatagaactattcatttttttcgtatatgtttatctaagaattttgaaactaaaatctttatttcactgaaatagctaccagaaacatcataaactttatgatgccaatttggtatggtccttaacatccaagagcttactttcattctcttgtattgtcgatacttctttgatgtgatattaagcttttgggacaggataacctcatcttgtgagatttcgcctacctcaatatacccagcagtttttatctgcgcaaggatcgcttcagctttctcgtttcgggcaataattgttgaccatacttggtttgttgtctttactctatccaaccaagcatcaccacacgaaaaatctgccaactcgccagttgcatcaatacaataaacgcaacggttgtttttctggatagggctcagctttgcatattctggataaggataggaccattcctttccttcttcattaacaatacgcatctggccaggaacgccatcgcctctatgctggaaatgtgtaacagtattaaatcccgcaacttctttgacaaaatagtccatttcacggtaatcgcgataaccaccacagaaattggcaattgtaagaacaatctcgaaggttatgctataatattttgcgtatttacgccaaccagcaatttggcatggcgttccaattagcacatagcgctcgccttcctttaattctgtcagaatagacaaggtgcttgttgggcaatatttcgaaccttgtgcttcaagaagttcggctttcgttcttgcgacataagtcgtttgtcttggctttccgttagggtaagtatactttgtgcagataattccatctgcctttccactctcgagcatatataatgcaatcgcagtcatagcaccacctgacgatgcgcgtttgagaatttcatcatctgtagaatgcactaactgcagagaagaataataaccgagttcataaatgaaatgaggagcttgatgtatagactttcccatttcctctatatcataaccggcacctgggcatacttttatatgatcttcttttgatgcagtatttttgaaagatgatttcaaattaccatctttctctgtaatatctgtgttttcatttatcacatggcacaaaccacaacctaaacataggtcgctctttattacttcttttattgtattaggatgcatatcaaataatagataataaagtttctctgctttttgcaactatgctcttatatgactccaaatgttgctttatggattttcgattacttatgcctttaataaccgttgctgtaacatcatcaatgcgtggggaatcaaggtcaattatttgattcggaagaccaattccttttccaataatatcatgacttctaaaatccattttacaggtcaacataaagtaaggagtacacatgcttgtagaattgataatagaatgtgtcctctcacctaacacaaagtctagattatgcaaaataggtcgcaaaacatttacaggcaagtcctctcgtatgataacaaccctatctttattcttcatacgattaataatatcttctgcgattactaaatcatcacctgcgcctttttcaatacaatgaggtatgaaatagaacttgcaattgatgttattagaaacattgtctaacaactgtgctatgaagtttctatggacatcgctcttgtttggcatattgaggaaactaccatggaaagaaatggaattttcacacatagtcagaccaatggaaatctcgttctgatctttaccgatattatatttatcaaggatggctttgcttctctctacatctctgtcgctcgccttacagtaaaacgccatatcaggtaacaggtaaggaaccctctttaagttcatgccattaacgtagtcgaaacaagtctgctcacgaaatacgttataatcggagttattgtagaacttataatctagcccctttgtgaagaaaccatactttgtctgaggcataaatcctgtacctggaacagaatagttataacctttcttctttaggaacaaaccaagtgctgcacaaaatgtgttatagaagccatcgtgggccaagagtattttgtctgcttttgcaaaagcagacatcacctcggaatgcttctctacttcactaacataaggtgacaaaccaatctgatatgtcaatgaacaaagtaaacgcttaataaaaccaactctgcctgcaaatttctttggatacttgtaggttggataacaccattttacggggaatgacgttatattgccatcgtgctcaatctcatctgactggccaaaaacaaagaagttaatatcttctttatatttttctttgtacaaagactctattccacgcaacagggcttcttcacccttgttttttatagggagatagtctgcaataaatatattcacgactttcttttagtattttttgtaattatttctttagtaagtaatcgctcagaatgcgtcagccccacaaaataaatgaaagcaaaagacgcgattgtatttgttatcaagaccaaaataagtcgagttacaccagcttcaagaaatgagtgaaggaagaatgggattggtagaaccgtaacacttactatggtacaaggaataatcacttttcgaatatatgctcgtatgctgtaattgaagattcctcttaatactattaaacatatgccttgattaacgattgccacaaaaaggctaatccaaaacacgcttaccgcagatgtgccaaaatgtaatgccacccatgatattggcaatatggtagtgagaattacacttgttattacttgatatttccgcatattgcctgttgcatgaacgacctgagatactggaggattaaagttggtcacaagcatattcaggattaccaatattgtaaatattgcagtaccatccggaacgttctcaccaagccataaatgaaggatatagtcgatctctatcataacgggaaatgatatcatcaccataaggtaatatgtaaatttcgacatggaaaacataagggatgttgtcctttgataatcctgtgatgagaaagattgcatcaattgtgggcggaatgcagtaaagatattcgtagagaagccatttaatgcactggatacctgataagaaacgcctcttgcagcatttacgataggaccaaaataaccgtttagaagcatattcagcccttggtcttttatcatgtatgcaaaagatccaaatatattccatccagaaaaagatatcattcgcttgagcaatggtttatcaatgtcttttgaaaagcgaattgatgcaaactcctttttcgaataaataaagtataagaaaaagtttgtcgctgagattagcatcattacgaatccatatactatcaaggtatcaaagctattgataaacttaaaatttatgacagcaaacagtttcaggaacacatctataatactaacgatagcataataattcattcgctcgtaggccattatagcagctgcataaggaacttggactatgacagacaagaatgatatgattgagaattggaatacccagttggcggcaacaattctatcggctggtataaccatcacattgttgatgtaccatataccaagtgcctctgctagtacaaatataatgattgcgagaataatctgaatgtataatgctgttgtatatatttgggagatgttcttaccaccagattcgccaatatcataattgtagaatcgttggactccatttgacattgaggtattcaagaaggcaaacatcgcaacgaagccgcctacgacattgtacaccccatagtcgactacaccaagaacctcgagtactactcttgagatatacaaggtcaagattagcactatgaacattcgaagatacaaaaatattgtattcttcgctatgcgtttgttgtttgctgttgtattttgagacatcctcacaaattttatgatttggcaccagccgtttgagttctttgtaataatcaaaggaatcgaacctttggctgcttatattgctttgttcgtttactgcacctcgtagcggtcggtctccttgccagcaaggacatctccaatgcggcggcatgcctgaccatcgccataaggattgattgccttcgacatgcgctcgtaggctactggatcgtcgagcagagctgagacttcagtgacgatcttatcgtaatcggtgccaacgagatgaacagtgccgcttttaagggcttctggacgctcggtggtgtcgcgcatcacaaggacaggtttaccaaggcttggggcttcttcctgaatgccgcctgagtcggtgaggacgatgttggccttagacatgaggtggacgaactcgaggtattggagtggctcaataaagaagaagtttgaacgagtgaggtcttcgccaaacacctcgtggataggcttgcgcacgtttggattaaggtgcattgggtaaacgaaatcaacatcgttatacttttcggagagatccttcatggctgtaaccatgcagatgaagccatcgccgaagttctcgcgacggtgaccagtaatgaggacgagtttgcgaccatcggtaagacgtgtgacatcgtagccaacattgagcagcaccttgttctgctcctcggcaaggatggcatcggtagagagcttatcgaccaccatgcggagggcatcgatgacggtgttgcctgtgacatggatctcgcccattaccttctctgcctggaggttagactctgagagtggtgttggcgagaagttgtaggtggcgatgcgaccagtgatctgacggttcatctcctccggccatggcgagtaaatgttgtgggtgcggagacctgcctcaacgtgaccgacagggatctgtgcgtagaagccggcgagggcgcctgcggtagaggtagtggtgtcgccatgaacgaggactacgtctgggcgacactccatgaagacgtcacgcagaccggtgaggacacgtgctgtgacatcggtgaggtcctgaccttgcttcatgatgttgaggtcgtagtcaggcttgacatcgaagatggtgagcacttggtcgagcatttcgcgatgctgaccggtgacgcacacgatggtttcgaactcagtatttcgcttctgaagttccttcacaagcggacacatcttaatggcctcgggacgagtgccaaaaacgagcattactttcttcatattggaattttctatattattgtaagcactcaatagctttttccctattaaatatcagcaacttatcatcgctgatatttttagatttaacattttaaattgctttttatgctagaaacgcttcaggagcgtatgttgcgcagtctttatttccattcattatttcacggaatatatgtaccagatagtccctgacttcaagaccatgcatcttggctgtttctggttacggtaaaggatctgatgacacgctcagcgatcatattgtcgatagtataacgaccgtacggtagttctgcaattcagaccaaccgttaagaatataatgaagaactttgttcattaagtcaccgtaatgtaaacgtttcctattctttagcatcttttctgctttagcataaagagagggaagtattgccgtcacatcagcttttgaccgacgtagctttatctcgtcagcactccagcggagcttgatatactcagcttcaatcatatacaaaaggccaatatgtgcaacaaacatcatttcattgagcacacataaggataaccatagccttgaaaagcttccatcaaaggtatctctgccataccttcctttagttgtacgtgataatcatcgttcatccgacctttattataggctttaataaatttcccaaaagtatattgcaacgtgtagtccggactatacatgtcatcaaagtagtcataatgacaatcatcgacaaaatggatagagacagacttcaatatctgaagatagtattgtattactgattcgaaaatgctagcagcaatactctcatcaacataatcagtcagagttgagattacttcgttgaaagaatcacagtctgcatcaagaggtgcagacttaatactctttttctatttcttggtttattataatcatcgtacctttatatatttaatgaaaaaatacgagcctttttggaatactttatcaacaatagttttatcggcaatagagacatggacaaatatccaatcacgatttagaatttctatttccttcaaacgatcatatttaagattaatatcataggaatcggtaatagagtcaattcctactatcttaatatcttttatatcgtgaaaaatcggctttacaaaattgctacctataaatccagctacacctgttacaagaacagttttactttccaaatttatattatagtttaccataatcaatctctctgaaaaatatcacgagtgtagactttttccatcacatcgtctaagcaactatcataacgattagcaataatagcatgactcatttctttgaacttcgccaaattattcaccacttgactaccaaagaacgtctcaccgtcttgcatgacaggttcgtaaataacaatagacgctcctttcgctttgatgcgtttcataattccttgaatagcactctggcggaaattgtcagaattggatttcatcgtcaaacgatagactccaataacgcatgctttctctttttccttattatagtcattttgttcgctataaccataatatccggctttagacaaaacttggtcagctataaagtcttttcgagtatggttactctctacgatagctgtcatcatattctgcggcacatcctgataattggccaacagttgtttcgtgtctttaggcaaacaataaccgccataaccaaaggatggattattataatgtgtgccaatacgaggatcaagcccaacaccttgtatgattgactgagaattcagacctttcatctctgcataagtatcaagctcattaaaataactgacacgcaaagcaaggtaggtattagcaaacaatttaacagcctccgcctcctttatacccataaaaagggtaggaatatcttccttaattgccccttcctgaagcaatgcagcgaaagtatgtgcagctttctctagagtgagaacatcagcaatggccttaatagcttcgttttcctcgtcaaactgttcaccatcaattagttttggatatccaacaatgatacgacttggatataagttatcgtaaagggccatactctcacgaagaaactcaggagaaaaaagcaaattaagcttcttgacttcctttcgggcatacttcaaataaagtccacggcaatatcccacaggaatagtagacttgattaccatcacagcatcaggattgacacttaaaacaagatcaatgacatcctctatatgatgagtatcgaaatagttcttcacaggatcatagttagtaggagctgctataaccacaaaatcagcgtcactgtaggccttggcaccgtcaagcgtagcggttaggttcaatgacttttcggacaaatatttctctatatactcatcctgaataggcgattgtttacgattaagcatatctactttctcaggaatcacatcgactgccgtcacctgatgatgttgcgacaaaagcgttgctatgctaagaccaacatagccggtacctgcaacagcaatcttcaattcttttatatccattgttgatttatgttagtgttatagattattctgactatttatccaaaacttcaaaccgaggtgagttcttggatttaaattcaggtaccactttcttcattaacctcactgtatccatgatctttaccgtacgggataacttctcaaactctccataagtttcaaggatatcagtatattcataatgacgtacctttgctatcattatcttcttattctcagtagggattgtattctccttatcactcaagacttcttcataaagcttctcacccggacgcaatcccgtaaactctatctcaatatcttcacccggacgataaccggccagttcgatcatacgggtagccaggtcaacaatcttcacggccttccccatctcaaagacaaaaatctcattgccttcacccatagtagcagcttccattaccaaacgacaagcttcggggatagtcataaaaaaacgaataatatcggggtgagtcactgtgacaggaccgccattctcaatctgttccttaaaacggggaattacagaaccgttactacccaagacgttaccaaagcgggtagtgataaatttggtacgaccttttacttttccctcacggatagcacagcccagactctgtacatagatttcggctaatcgtttcgagcatcccatgacattggtaggattcaccgccttatcggtagaaaccatgatcatcttctcggctccgtattcaactgccatatcggcaacctggcgagaaccgacaacgttgaccagcacagcttcacagggattctcttccattaacggaacatgcttataggcagcggcatgaaagatgatctgaggctgataagtttcgaagaccatacggagacgttctttcacacggacatctccaatgacaggaacaaaatcaagaccgggataattcttctcaaattccagacggacattatgcaaaggtgactcggcggaatcaaacatgatcagtttcttgatgttcatctgagccagttgccggcaaagttcactaccaatactaccggcagctcctgtcaccagcacaaccttgccacaaaactcagtcatcacctcctccatattgatatgaatttctgagcgacccagcaagtcttcaatcttgatagggcgtacccattggtggaaactgccgttttcgtcagcctcactgatactcggagcaatcaacgttttcaatccactccttttacaatattgaagcaggcggtcttcctcttcacgggtattctcgtaacgggcaaataggatgccgccgatacacttcttatgaataagtttattaaagcactcttcatccttaaatgaataaacgggaagatcagccacacgccggatggagtcgcctgttccgtagatacagaagcctaccactttatagtgggagctgttcattagccgaactttcaatgccacactcttatcatcaataccatagatcagaatatgcatattcttcttattcagcatattcagcaggagttcatataccagaatcagctgaatacggaagcctaccatggcaataaaagtaagcataccatcaaacagtacaaagactattttctgactattatgcagtcccgtctgaggcagaaaaagccagatagccattgcgatacagacagcttttatcagtgcacttccggcaagtctccataattccttcaactgggaaaaacggatcgtattacggtaggtatggaataaaaaggaacctaaggcactggagatcaccgaaatcgccaaaatatggaagagagaagtgatttctttagaagtctccgttatataatgaatgccaataaatgacacccaggtacaaatcaaagctatgaacgtatcaattcctaatacaatccaataactaaaatagtttttctgcaaatattgaacaaaacggtcaaatgcgtgtttcataatttaaataccccaataaattataaagtctttttccaaaaaagtagatttactatgacaatagtttatcgtagattgtgtgtaactgaattttcaatggtgaaggcaattggtttttcagaatcatttgcgaacgcctcagaacagtcttcttctttgcctcatcctccgaattggcatacatagacacactatatcccatcagaagagacagacacaaagcagcttcctgctcagcagtcttaccgtgacaaggatacagatcattgatctgttcatggatctctttattaagtagtgaaagatcgtcgacacatatacagtccatattctcacccatatgaagcaatgtatcaactgttttttgaagtttttctattttcccctgtatgctactattgaaggtccccatcacctacttagtttctttcgccaatttgctctacatatccgataggcatatcgacacaggcacagcccaacatatccagccggacagcaatcttacttttgccatctaacgcaactagttctccaaccagtcccgtcaaaggacctttgataacacgaactttctttccacgagctaatggagaataattcatacagattgcctcttccgaataatcgagcataaaacggaaacgcgccatctgatcatcaggaatcacagcaggctttccctcaccacgcaacaccatgtaacggcttaccgtggcaagagttaaagcagccatccgttccttcggatcggcatgaacaaacaccatcatcggaagaagaactgtttcaactaatttacggcgatcactccattgatggatttcttgctggacaggaacaaaagtctcaattcccattttccccaaatattcggctacttttttttcgtgatgtatgcgaacatgtgccacataccagcgttttaagcacgctacgccctcccctgtcccatttttggtcccgaggatggctgatttctcttttgttagaatcattttattttaccccatatgtttccgttacttcttaggtaacggaagtgtatacagcataaacgaacaatgaaaaaaggttgaaaagcagcagcaaatatgttgtcaagagagttacaccctaagtataagggtatataccaatggaaattaggtatataaggagtggggcatgaaaataagtatttttcatgtctaaagatgtttttaccctatattttagataaaactaaaaaaagtgggctttaatttgtttcttatttgtgtttttgtctatctttgcatcaaatttacttccgttacctaagaagtaacagaaacagatccatactgactatcaacttattaaatattttacacccgtcctatccgacagttcttcacgtaagataaattcattcgattcacttctgtacgttcctgcagaccaaaacctttcagataaatctgagtagtcttaatagacttatgccccagcgactcactgatcatctcaataggaacaccacgatacttagcggtagtagcccaggaatgacggatagtataggaagtgacaggagaagtcagccgaagagcctttgcaagtctcttcagacgattattgaacctgcggagagcggactgatattcccgatatgcactttcatcttctctcttcttgtcgccaagaaggatactgaacagatagtcgggacaatccggatgagaaggctgacagttgcgaagccggctgattatatcctgtgcagtatccagtacttccacactcatcggagttttcgtcttgatacgattataccggatgatattccgttccagcgaagatttctccagatgagcaaggtcagcgaaagacattccgcagaattgaaacatcaaggcagcgatagcctgcgtacgacgcaaacgttccgatttgggatcttcatagaggaggcgattaagttctccgacaggcaacgctttcttctggcaaatatccactcccgtataaacatcatgaaacagacgatgcacatacggagctctgcccgactccactcctctattatagatgctacgaagcatacgcatatacgttgataccgtattcggcttcagaccggaactataaagatactgcccgtaacagcgcaagcgttcacgggtgacttgccggaaagcaacatgggtagtgccacaaaacttggtaaaagaaaaaagagcattcgtataaacatgggccgtagaatgacgcccctcttttcgtaaacgaccgatgtacgactccgcacaacggctaaatccatttttattcatatatatcactagtaaatttatacaatgataagacgaaaaaaatgatttagcaacagaagtttaaaacctttccaaaaaaattatataaaactgaatggggatagaattgatgctactccactatccacttctcaatattgcgtgtttctgagctaaaattgacacctatcttgaaaagtcggcgtccgtctgcctcaaaaggaagtgcataatgcttttcattaatctgtttgatagcttcttcagcagtaccatccaacttaaattccatcacatatatgaatttgtcagtctgtaagacaaaatcgatacgcctttctttctacaacgcaaagcaggcgagaaagtttttctcgcctgcccggtctatacttttatcaataatattgtctattatttacacgtatgtttccagcaattttacgtttccagcttccggagtaattgttacatcctgtgttgtagcaggaagcagaatagattctccggcacctactttcagttcattaccttcattgtcttttatcttgcatgcaccttccatacaaatgaagatcacgaatgaatcgagttctgaataatcacagctgatttcttcggtcatatcatacacggaagtagtgaagtacggacaagctacaagttctaccggctcatctttcaccgcttcgtatttggtacgataatcatccaacacttcgtaattgatggcttcacgcgccaggtcagtatgcaattcacgagtctttccgtttgcatccttacggttgaagtcatagatacgataagtaatatccgaagtctgctggatttcggcaataaacgcaccggcgccaatactgtgcacacgtccggcaggaaggaagaatacatctcccggcttgatctcatactcctgcaatacgtcagtgatcgtattgttcagcacgcgctctttatattctttcggggtgatttgctcggaaaatccagaacgcagtttcgctcctttatcagcatccactacataccacatttcggttttacccattgagttgtgccttttctttgccaaatcatctgccggatgcacctgaatggataaatcctgctttgcatcgatgaatttgataagcagtgggaatttattgccaaaacgagcataattcgcttcgccaaccagttcctcgcgatactttctcaccatatcagccagagttaaacctttgtccgggccattagccacaacagattcattgtcctctacgccggaaatctcccagctttctcctactcctttcaagtctgaattcaaatgcttgaacggaataattttgtcgcccccccaaagcgtctgcttcagaataggttcgaattttaatggatacatttttgtttttcttgttaataaacttagattaaattctcccggattataataatccgggaacaaacatacgaaaaattgttcactttaaaagaaaagaaggatgaaaaatacagaaacctaagtgagaacgctaaactttcctaaactacccaccatatttagccggaataatttgtgagtaacaaagaatttacctttatttgcaagaaaattttaagaataccagacatgaataacacattcccaacggaagggaatctatcagggctcagccggaaagatttccaaaaggagataaataataaagaaactgatttatttatcctcaaaaataaaaagggaatggaagtcgccgtaactaattacggatgcgccattctcgctatcatggtaccggataaagatggaaaatatgcaaacgttgtcctcggacacgacagcatagaccacgttgtcaacagcccggaacccttcctcagcactactatcggacgctatggcaaccgcatcgccaaaggaaaattcacattgtacggagaagagcacgagctcaccatcaacaacggacccaactccctgcacggaggacctaccggttttcacgcccgcgtttgggatgccgaccaactggctgaaaatataatccagttcaattatgtttcagccgacggcgaagaaggtttccccggcaatctggaggttgaaatggtttatcgcctggaagaagaagaaaatgcactggtaatcgaatatcgtgccacaactgacaaagctactgtagtcaacctgaccaatcacggtttcttcaatctggctggtatcagcaatcctactcctactatcgaaaacaatattgttactatcaacgctaatttctacacgcctatcgatgaagtttctatcccaaccggagaagttgccaaagtagaaggtactccaatggacttcaccactccgcataccgtaggcgaacgtatcaacgataaattccaacaactgattaacggtgccggatacgaccactgctacgtactgaacaagattgaaacaggttcactggatttggctgccacttgtttcgaaccgaatagcggtcgtaccatggaagtatacactactgaagcaggtgtacaactttacaccggtaactggctgaatggtttcgaaggtgctcacggtgctacattccctgcaagaagcgctatctgcttcgaggcacaatgtttccccgacactccgaacaaacctcatttcccctcggctactttattgccgggcgatgaataccagcaggtgactatctacaaattcggtgtggaaaaataaaagataaaaaaataactaacctaattttataaactaacatttttaatagaaccatgacacaagaaaaaaagaatggaaaaatcattgccattatcacgatgattttccttttcggtatgatttcattcgttactaacctcgcagctcctatgggtattgtgctgaagaaccaattcgacgtatccaatgctttgggtatgctgggaaacttcggtaactttatagcttatgcagtaatgggtatccccagcggtatcttgttgcaacgtgtgggatataagaaaacagcacttatcgcagtagctatcggttttatcggcgtaggtatccagttcctgtccggtcattcaagccctgagatggcttttgccgtttatttgattggtgcattcgtagcaggtttctctatgtgtttgcttaacactgtagtaaacccgatgttgaacaaactgggtggtgaaggtaacaaaggtaaccagcttatccaggtgggcggctctttcaactctgtaatggctaccatcactccgatgttcgttggtatcctgatcgccggatctatcgaaaaagctactatctctcagattttccctgtaatgtacaccgcaatggctgtattcgctttcgcattcttcgtactcctgtttgtacgcattccggaaccgaacgctgctgctacaactgaaccaatcagcacactgatgaaaggtgctttgaagttccgtcactttgtattgggcgctatcgctatctttgtatatgtaggtattgaagtaggtgtaccgggtactctgaacctgttccttactgaccctgtagaaaaaggcggtgccggtatcgcttctacaatctccggtttcgtagtaggaacttactggttcctgatgttgatcggtcgtctggccggtgcttcactcggtgcaaaagtttccagtaaagcgatgcttacatttacatccgctctgggattgattttagtattccttgctatcttctcttctacaggaacattggtgaatctgcctgtactacaacaaagcgcaactggcggtttgtcattcggttttgcagaagtgcccattaacgctatgtatttggtattagttggtctctgtacttctatcatgtggggtggtatcttcaaccttgctgtagaaggactgggtaaatatctggctgctgcttccggtctgtttatggtactggtatgcggtggaggtatcctgcctgtaattcaaggatgggtagctgacgtagccggtttcatggctagctattgggtaattatcgctgctctggcttacttgctgtactacggtctggtaggttgcaagaacgtaaataaagacattccagtagaataaaaaatctgaatttaatttattcaccttataaaattgatttatcatggatatagaacacgtaagaagtcgcttcattaagcattttgatggaactacaggatttatatatgcctctccgggtcgtatcaacctgattggcgaacatactgactacaacggtggattcgtattccccggagctgtagacaaaggtatgcttgctgaaatcaaaccgaacggcactgacaaagtaagagcttattctatcgacctgaaagattatgtagaatttggtctgaacgaagaggatgctccccgcgcaagctgggcaagatacattttcggtgtatgccgtgaaatgatcaaacgtggcgtagacgtgaaaggattcaataccgctttctccggcgatgtgcctctgggtgcaggtatgtcttcttctgctgctctggaaagtacatatgctttcgcattgaatgaactgttcggtgaaggtaaaatcgacaaatttgaattggctaaagtaggtcaggctactgaacacaactactgcggtgtaaactgcggtatcatggaccagttcgcttctgtattcggtaaagctggcagcttgatccgtctggactgccgttcactggaatatcaatatttcccattccatccggaaggttatcgtctggtattgatggattcagtagtgaaacacgaactggcttcttctgcttacaacaagcgtcgtcagagctgtgaggctgctgttgctgctatccagaaaaaacatccgcatgtagaattcctgcgtgactgtacaatggatatgctggaagaagcgaaagctgatatcagcgctgaagattatatgcgtgccgaatatgtaatcgaagaaatccaacgcgtacttgatgtttgcgatgcgctggaaaaagacgattacgaaacagtaggtcagaagatgtacgaaactcaccacggtatgagcaaattgtacgaagtgagctgcgaagaacttgacttcctgaacgattgcgctaaagaatatggtgtaaccggttcacgcgtaatgggtggcggcttcggtggttgtactatcaaccttgtcaagaacgaccggtatgacaacttcgttgaaaagacaaaagaagctttcaaagctaaattcggcagaagcccgaaagtatatgatgtagtaatcggtgacggttcacgcagagtagaataagttattattcatcagaattaaataagcagggcgtctttccggaatggaaggacgcccttacttttcaattaacaaaaatctaaaaacctattatctaacctaaccctataatttcctgtttattgtacgccttccgttgtcatctgaatgcgtttcatggtaccgtcctcgttataatacaaacgatcgatgcagacggaacgacggaaactgcctccggctgtattgatgcttccattatgataaatgaaataccagtcgcccttgaactcgataatagcctgatgattggtattggaattgccggctatctcattaaggatgcctttgtattcccaaggtccggtaatgctacggctcatggcgtagcatatcttttccggaaattcagaagcatatgaaaggtaataccagtctccacacttatgtatccacggagcttccgtatatcggggcagatgaaccggtacgataggaccatccagctcgatcatattctttttcagtttgacatagtagcattgggtattcccccaataaagatatgcctgtccgtcgtcgtcaataaaaacagtcggatcgatatcttcccaagagatcttggtaaattcggtcgtcatatcattggtgatcagtgcggaaccacgggcatccacaaaaggaccgacaggcgaatcagatacggctacaccgatggattttccgtgaatagtgccgtgttccaccgtcacataccaatagaacttcccgtcacgttctatcacctgactagcccatgcttcccctgttgcccaactgaaatctttggctttcaaaggtacaggatgctccgtccatgttttcatatcgggagacgagaatacacaccattcattcaactggtaatgttctttgggaggaggacattcatcatgtccggcataaatgtacaccttaccgtcatgcaccatagcacccggatcggctgtatatttatattttatgatgggattgccattggctacaaaagtagtgtcattctgcgcagacagcccggaaaaggctgccaatacgcatgaaatcataactagtttaacgctattcattttatttcttcgtgaatttataaactgcaaacgtgttcggtccgagttcggtggttaacgcatgaccattgatcgttaccggtgtctcctgcggagtgatggcaaacggttgttcaagcgtattatctttgtcctggtcgagtgagctaagagtgatgcaacgtccttcggacaatacatcctgctttttcagaccttcgaaagtcaaggatacaggctgtgtcttatcggaagtattagctactttgacaatcagttcgttcttatccttatcatagactgcactggcaaaaagtccgttttgtccttccgcccctgttaccggtttcttgttcatagtgagaggaagtacattcgttcctttgttctgtgcgtacagctgctgcacataataacttacggtacgcaccgagttaagattatcaaaccaaatcatgtccggacgccattgccatccctccacatgagcgaaaagcggcgcataagtagccatatgtacgatatcggcattacgttccaatccggtcatgaaggctgcttcgagcaaggcagcatggaagtggttccatttctttccttttccgtgacaagcatattcgccggcaaatactttcggtcctttgcggtcatagttatcatagcgtgctccctgactgaggaaccagctttcgggacggtagaagtgttcgtctaccagatcagctttcagacgcttcatctcaggccacaggtaatcaaattcttttccttcggaattcgggccggaactgcctacaatcatgatttccggatgcgccttgcgaagagccttgataaacggttcgagacgttcgggatactcttttccccactgttcattaccgatgcccagatatttcaaattaaaaggtgccggatgtcccatatcggcacgtactttcccccaagtcgtgttcacgtctccattggcaaattcgatcagatcgagtgcatcctgaatatagctgtccaggtcgcaaactgctacgtgagctttttcttcattgttctgatactgacaggcaagtccgcagttcaggatcggaagcggtgccgctcccatttcttcagaaagaagaaaatattcatagaatcccagtccgtagctttgataataatccggatagaaacgatgggtaaaggtatattgccaacgattttcgttcaatggacggttttctaccggccccacggatttcttccagtcataacgggtttcgagatccgtaccttcaacgatgcaaccaccggggaaacggaagactcccggatgaatatccgccaaagcctgcgcaaggtctttgcgaagaccgttctcatgtcccttccaagtatcgacagggaaaagggaaatatgctccaagtctaccgtaccctgggaagcaaggaaaatacgaagcgttgctttgggattggtaacacccgcttttaagattacctgatacttcttccagtctttggaatcaatggtcagtgtctgagaggcaaaagcctgatgttcgcccatagatttggtatctacaagttccacacgtatcttttcacctgtacctccgtgcggcaaacgtgcccacacggaaaagcggtattcttcaccttgcttaaccccgatgccgaagaagccttcattatccagtccggtatgcttgtgggcatgtcccggattatcaagacgcacataatgcggattgcgttcaaaaggaccgtcatcctgcaaagtcacttttccataagtcttccatcccatcagacgctgagggaattcgaatgaacggttctttaccagttcggcataaagtccgccatcggcagcataattgatgtcttcaaaaaagagtccgtacattgtcggctggatttcagcacccaacttcttagtctggatcaccatttcattggtttgtgcatgaagtgccatgccggtagataaggctaatgcagccagtaattctgtgtatcttctcatggttttcaataaaaattatatatagttatttgattctttttccccagacagaacgtccccggctatcgagtccggtaaagagaattgtttcggtttcattctcccaatcgtgtcctgcaaagataaccagattctcaatcttctccgagttcaaatctaccattaatagatgtttttcggtcaaaaaggaccattttccattcatttgaactatattccattcgttatcggtcatctgccctttgcacgtgccgtcttttaccaaagtcactcgggtggacaagttccattccttctctttcagttctccctctccccataagatctgtccggcttccagctgacgttcgtatgccggttcctgcactcgtatgatttcccattcaccgaccagatcttctttgctgaattgacgcgaagcagtccctgcatatctctcgggagaagcgaccggccagccttcgggagtgaagaacaactgccgtatatgtagcaccattaactgattttgcggtgacagacgtccctgatgtgccataaaatagtttccttcaccgtcagaaaagacggcacaatgcgctgtacccgcccatccggtatggttctcaaaacgatatggtgcagtcagtatcgggaagttgttggtcgtatctttcacagccttgccaaagtagtccgtaaacggaccttcggcagcatccgaacggctgacacgtacattataagtcgtcatcagcggatcataggaagtgaaaagataatattgtttcagctccggatgatagattatttccggtgcttcgagattgttcttccgatagttggcacgctgtgctacaaggtgccccaaatcgccttcgtttaaggctaatccggtttcaggattcagttcgacgcaatacagaccaccgaagaaggagccgtaatgcatccaccatttaccagtattttcatctgctatgacgctcggatcgatagcattcatcgcggtagaatcatctgttttaacgatacagcctttctgcgtccatggcccttcgggagaagttgattcggcaagtcctatataggatgttttacgtccgaatgcggatacgcaatagtagaggcggtatttatctttataagggatgatatacggtgcccagatattggtcgccccctgccctcctgcatgaaactgtacccattgaaccgattcttccggtatttcaggaaatgcccatcccagaaattcccaatgtaccaaatccttagaacggcgcatctggataaatcccaacggcacgcctttctctctcgcttctttccggttctcaccgaaaatcgcatctgtagaatacatataataatagtcgcccagcttccggcaggacggatcgtgtacattgtatgttccccattgacggtaatcttccattttggctactgataaataattatcatcccaaggattagcagaaggagtcggagtaaacacggaagaagtgcaacttacaaagaagctgcctgctactaaaagaactggcaaaaacaagtttttcataatatctgtgtattcgttcatcaattatgctacaaaaatacgccccgtttcccctatgaaaggtggacatacgaacacgattggtggacaatccgataatctgctgaaaagaagctcttcccatttttgtgattgaagagattcttctaactttgcccttattaatacgtacatatatgaaaaaacacctacttatataccttataatatatagtatctgttcactggccggacaggttcgggcacaggaacggtttgccgaccgctataatattacgtatgtgaccatgaacgaggggcttccacataattttatcgacgatttgtacaaagacagccgggggtttatgtggatttcgactgccggaggcgggctttcccgttatgatggctatgagtttgtaaactacactcccaataatcaccaatgcaaactaaaaagcaactttatacgcaatgtctgtgaagacgccttccaacgcctttggatcgtctccgaagggggaacggatattattgacttatctactttaaaaccgattatcccccatgacccgaaagggatatttccaaagatactggaactaccggctacccgtatcatgaaagatacgcaaggctgtatctggcttcattgcgacaacgcccttcaccgtatcgaattcaatgacaaaggggaagtgcaaatcctgtctacactcagccctgtctatctgaatggtccggacattgctctgaaagacattgacgaggatgggaaaatatggatgggaaacaatggagaaatacgaaaagtggcattaagtccgcaaaagagactggtaaccactcccatagccgactgcctgaagttcgaagcgggaacttatatttcggatttcctcagcaaagagaatgaagtctggatctccagtgaccgcggactattccgctataataaaactggaaatgtgataaaacgatatgagcatgattccggcaatccctattccctgtcgcaaaattatctgacaaatttagctatcaccgatgacaaacaattaatcgtcgcgacactacgtggtattaatatctataacccgatgacggataattttgaacgtatagcctgtgaccttccaaatggcggtaccaatctgctgaacagtaactttattaattgcatattgactgatggagaacatatctggttcggtacggaaaccggaggtatcaatctgttgaatccacggcaactatcgatacggagctaccggcatgacaaggaaaatccgtcaagtttatcctataatcctgtcaatgcaatttatgaagatgtatacggaaccttatgggtagggacagtagaaggcggactgaacagaaaagaacggaacagcgaagatttcacccattatacacgtgaacacggaggactgagtcacaactccgtcagtgccctgactgccgataccgacaatcacttatggataggtacatggggaggaggtctcaatctgcttgatctgaaagctccccgacagatactggaggtaatttcctcacagaccggcggaggctttccgattaactttatcggagtattgaattatgaccctattaatgaaggtatatggataggcgccaatcaaggactctatttttatgatccggtaaaaaaggaaataactgctccgttaccggataaggctgctgaaaatattcatggctgtatcggttccattattgataaggagggtaaactttgggtcggttgtctggaaggggtttatatcatcgatctgcattcccgttcctctaaaggagaattccagtacaggcacctgaactacaaactggacgatccgtcctcccgcctgattgagaaaataacctgcttttatcaaggtaaggacggtactttatggctgggcagtaacggatatggcatttatcaacgaaaaatcgatgctcaaggaaaagaacagtttatctcttatagcacagcgcaaggactaccgaacaatagtgttcggggaatactggaagataacaacggtaacttatggatcagtaccaataatggactctcctgttatcaccaggcagagaatcgtttcattaactataccatacaggatggtctgattgacacacagttttattggaacgcctcatgtggttcttctcatgacttactctatttcggcagtgtaggcggattggttgcaatcgaaagtaatcgtccggcgatgtctcttccagctgccaaagtacgtttcacccgcctgcggataggtaatgaagaaatattgccgggcagcgaatacttgtcggaagatattgccataacgacggaactgaaactgcatgaaaaagagaaatctttctcactcgaatttgcagcgctcaactttgaatcaaacaatacagccatatacagttatcgtctggtcggttttgacgataaatgggtacaggttccgggcaaccgtcgtttcgccagttatacgaatttacctcccggttcatatactctacaggtcagatacactcctgatggtgagaacgagggagaaaacataacggaactgaagattacgattgtaccttatttctataagactgtatggtttattctattcatcatcgtattgttatctgtcagtgtatggcaattctatcaatggcgcatccgtaatctgaaacggcagaaagaatatctgcaccgcacggtagaagaacgtactcatgaactggaacagcaaaagcatctgttagaaaatcaaacggatgagctgtcacgccaaaaccagatgctgattcagcagaatgagaaaatcacgaggcagaaggcacaactgattcgtatgtcccgtaaagtgcaggaattgacgcttgacaagatttcattctttacgaatattacccatgaattccgcactccgattactctcattatcggtcctatcgaacgtgcgttgaaattaagctacaatccgcaagtcattgagcaattgaacttcgtggaacgcaattccaaatatctattgtctctcgtcaatcagttgatggatttccggaaggtagagtccggcaaactggagattgtgaagactcggggaaattttctgaaatttatcgattcactgatcactccgtttgaagtattcgcccaagagcggaacattgtgctcaaacgctattaccggatggaaatgccggagatcttgtacgatgaggaagcaatgcgtaaggtggtcaccaatctgttgagtaacgctatcaagtttactcctaacgggggaactgtgtctctctacctatctgctcttttcgccaaagacagtgaaaaagagactctgtatatttgcgtcaaggacagtggttcgggcatccctgaggaagacctcaatcggattttcaaccgcttctaccagtcgcagaatcaagtgaaatatccggtatacggacaagcaggaacaggcatcggtttatacctctgcaaacggattgttcaaatgcacggcggagagatcaaagcattcaataaccgtcatgcgggatgctctttccgcatcctcctccccttgcaacgaaatgaaaggaaagacgaaaagacaatcattattgatcacaacgattcgtccgcaactcctgttcaggattccggctctccaaaagagaaagaggctttaagtatactggttgtggaggataatgctgatatgcggggatatatccggtctattcttcgtgaacagtatcatgtactggaagctgccaatggcgaagaagcattacatatacttaatagtaatccaatagactttattatcagtgatttgatgatgcccgtcatggacggaatcgagctgtcccgaagggtaaaggagacatttgccatttcgcatattcctttcctgatgctgaccgccaaaacctcacaagaagcccgactggaaagctatcgtatgggagtggacgaatatctgctgaaaccttttgatgaaacattattattggcccgtattcagaatattctggagaaccggaaacgatatcaacgtaaatttacgcttgatatggacgtggacgtacttaatatggaagaagaatccggtgataagaagttcctcaatcaagtaatggaagttatcaaagagaactacaagaactcctattttgaagtcagcgatttttgtgaagccgtcggagtaagcaaaagcctgctgaacaaaaaactgcaaaacttaatcggtcagtccgccggacagttcatccggaattacagactgaacatcgcacgggaattgattctgaagaatcgggaaacgaagaatatgaatatagcggaagttgcctacgaagtaggattcaatgatcccaaatattttacaagatgcttcacgaaacatttcaatgtgacaccaagcgcactgctgaataacgaagaataactgatataagggttgctattatgaaacaatgatagcagcccttcgtcttaaaatgagctcattttaagagacatccgtccaagattatactcaaagtgtaaaaaagacacttatataaccgtttatccacctcgaaaattcatttgtccacctttaatatactcatcggttgtatttttgcgacactacaacgagtagaattattgttgaaccattaatatcaatatctatgaagacaaggaaatggccgttactacttatggcaattcttaccgttctcagcatgagttcttgtcaggattggggagaagccgatccaccggcaggaaatcaaaaacttccagcaaagccggatacctccgctaaattaatagctgaatttacatttgacgaagatttcaactctactgccaccgaaggcaaaacacctatatcgggggaaggttttgcatacagtgcagatcaagagattccggaaatcgtacaagatgatgaaagagaaagtggagttatgcacgccaacggcggatacctccgcattcccaaccctcttatcggtgcagatatccagacaggagtctcatttagtttcttcgtaaaatctactaaaacagaccatacaggcgcactgatctcattcagtgacggaacaaacaaactgtatttcactgcaaatgcttttttgagctataccggcacaggaggctatctggacgtaaatgatccggaagtcagtgtaacgaacgcaatgccttacgggacatggcattatgttgccttgactttcacagagaaaggatacgccatttatatcgatggcaccaagaaatacgataccaacaaccatgccagcatcagttccggaaagacaagggctgtgagcgtaggtgacttcgattattccaatatgatcgatttattgtcatctgcgacctatatatatttaggctatggttcggatacggaaacagccgaagcctattatgatgatctgaagatctggacaaatactttctcggacagcgatgctcagggaccgaatatcggtagcggaatacatgtgcccgatcctgtttataaagctactttcgaaacgactaccggactacagatcattggcggtggcagctttgttacagatgataatagcgccttcggaaccgtattcaagaatatccccggaggaatgcgtcagaattacttgttgcttccggaagatgtaatgtcacattctgccgaaacgaaggaaatgtctatcggtatgtgggtgaatgcgaaggatgccggaatctcatccacttatatgtggtcaccattattcagtgctcacgggcaggcaccgggcatagcaggtactgccaatacagacaactggcctatgtttgcattgtatgtaagaggaacattacaactgaataatgccggatggtgcaactttgatgatgcacagaatgtaaatggtaccaatgctctatatcatgacgccactgactggttagccgatcacgggtggcattactatacagtaactctcaccgctacttccgccaaagtatatatggatggcgaactgaagaacgaatggcaggtggcaggtaccggagataataatacaattgaaggtgcattcatttatggtgccaactacaaatacatcactttaggcggaaatcaggcgttcgactggggcgatcccgatccgggattcatgtttgacgacttcgcagtctataacaaagaattgtctccggaacagatcaaacagattatggaagacaagactttggctctgcctactcctgtctacatcaatacctttgaagaaggaaccggagatgcaaaaatcgtaggttcgggcaaaatagtttcagtggaagacaaagggttcggacaaatattccagaatgtagccggttctaaaggcactaattatctgatgttgcctcaggatgctctttcccactccgtagaatctcaggaagtgagtattagtgtatgggtgaatgccaagaatgcaggagcatcggacgattatcgctattctcccctattcacggcatacggaaacgagccgtcggcaggatcagagaatatatggccattgtttgtcctgcaatcccgcggacttgcccaaataaactgtaacggatggacagacttcaccgccgcacaaaatgagaaaggtgtcaacaccgtttattgctcggaatatgcagcagatggaatcgtttgtgaggaagactggctgaaggatcatgaatggcatctttacacagccgttctcacgtctaccacctgtaaaatctacattgacggagaagtcgccaactcatggacagtatcgggcagcggtgacggcaataccatctccggaatattcaccaacggtgcagacttgaaatacatctcattgggcggaaaccaggcatggacatgggctgaccctgatcccggatttatgttcgacgacatcgctatctacaacaaagcactgacaatcgatgagatacaggctattatgaaaaagaaaaagaattaaaccttaaagtttagtatacatgaaaaattttatactgatactctgcctcgccacattcagccaatgggtgtatgcgcagaacaagcagatcaccggacgggtagttgataccaaaggcgaagccgccattggtgcaagcatacttgaaaaaggaactacaaacggaaccattaccgactttgacggtaatttcaaactgacggtcggaccgaaagccgtgttacaaatcagttatatcggttataagacacaggaaataccagtagccaacaagacgaaactgaatatcactatggaggaagacacggaagtgctggatgaagtcgtagtggtcggatacggtgcgcagaagaaagaaagtgtggtaggtgccatctcgcaggtttcttccaaagaactgttgaaatctccggcagccaatatttcacaagcgattgccggtaagatttcgggtgtaatcacttctcagacttccggtgcgccgggggctgacgatatgaagatttatatccgtggccgtgcttctttcgcaggagacaaccagccgttgattttagtagacggtgtagaacgcgagttctcacagattgctccggatgatatcgaatcgatctctacgttgaaagatgcttccgctactgccgtatatggtgtgcgtggtgcaaacggtgtgatgctgattacaacaaaacgcggtaaggaacagaaaccgactgtcagcctgaccgccaactggcaaatacagtcccctacccgccaggatacttatctggattcttacaattcggttgtattgctggaagaagcgctggctaacgacggactgccttctcaatattcggcatccgacatcgaaatgtataaaagagcctcagcaggacaactcagcggaatcgatgccctcctctacccgaatgtagactggtatgacaccgttttgcgaaacagtgcaccggcacaacgctacaatgtcaatatacagggcggtaccaaacgtatgcgttactttacttctgccgaatattataaccaacagggattgttcaaggaattcagtcaggacgaatacggaaacaagtcaaactccagcttcaagcgtttcgctttccgtgccaatctcgacttcctgatgaccaaagacctgactctttccgtcaacttcgggacacgtttcgaagaacgcagaggaccgaactcgaatgaatcgagagacggaacttacagtcaggcattttatgaaatgaatcatacaccgggatggttgtttccggtatcctataccgtaggtgaaggtgaagaccaaaagacattgtacagcggcagctcacaataccagaataatatcgtggcacgttttgccaaagccggtttctaccgctccaccaatacgatcaatgaaacaaatttcattgtggattataagatggactggctcaccaaagggctagcagcaaaaggaatggtatctttcgactacgacgcttactataggcgtgctttcaatgccgactttgccacttatgagttgaatgaccgtactaactacaattcaatagacgcctatacccagttcaatacggacacggaacttgcttatctgggcaatgatcagactactacttataaactttacatggaattccagctgaactgggcacgtaaattcgacaaacatgacattaccgctatggcactgtacaaccagaatgactaccgttatcaggcagaccttgccgaacgttaccaaggactggtagggcgtgccacatacggctacgacgaccgttacctggcagaagtcaacttcggctataacggttcggaaaacttcatgcgaggcagacgcttcggtttcttcccttctttctccgtaggatggagaatcagcaacgaagccttcatgaaaggaacggaggactggctgaacaatctgaagatccgtgcatcctacggtgaagtaggtaacgatgtatacaaagtgaatggtgtaaaacaacgtttcctgtatcaggcagtgtggacacaggtagccaacgactatcatttcggaacaaccggatataccggtatctatgaaagccagtaccctaactatgcagtgacttgggagcgtgctcacaaatacaatctgggactggaatttggtttatggaacggactgctgaacggtaatatcgacgtattctatgaaaagagaaacgatatcctgactccttacctcacccgtccgcaatgggtaggcgtcaatatggctgccggcaatttgggagaaaccaacaacaagggtttcgaaatcgaactgaaacacgcgaatcatatcggaaaggactttacctacaatgcaagtctgactttttcacacgcccgcaatgaaatccggaatatggacgaaccggccacaaagacagcttatcgcaaacaggaaggtcatccgatcaaccaatacttcggtctggtgtgcgatggttttgtaacccaagccgacctgaacaatcccgattttccggtttctactttcggcaatgtacaggtaggtgacctgaaataccgtgatatgaacggagacggatttatcgacagccgtgacgaaacatttatcggctatagcgatgttcccgaaaatacttatgccctgtctctgggatgcgaatacaaaggcatcggattcagcatcatgtttcagggagtagatcatgtttccagatattatgatgcggaagcaatgtacgctttcgtgaatggcggtaaggtaaaagaacatcatctgaatcgctggaatcccaatcagtcggaagcatacaaccttacccatgccagctatccgctgctccattatgacagctacggcgaccataaccagcgtaaaaactcgttcttcctgaaaaacggtaacttccttcgtctgaagaatatcgaactaagctactcgcttccggctcgatggatcagaaaagtagccatgaacgaatgccgcgtctatgtaaatgcaaacaatctcatcacgtgggataaactggatggtctttgcgatccggaaagtgaaggttccaaccgttacccgattatgaagactgtgaactttggtgtaaacattaaattctaacagatataagacatgaaaaagacaatcatatataccgccttttggttggcaaccgccggaatcgccctgacttcctgtgaagatatattcggtggttttctggacaaacagcccagcaacgaactgacagaagaagaggtattcagccaatggactactacccgtgagttccatttcgatacttacaacttcctgcgccacggtgcttgccgcgtcaacaactcatggatggatgcagctaccgacttagccgaaaccagctacgccagcggcggcacgcgtacaagtttcaacatcggtaactattatgccagcggtgccgccactgaacttaccggcacatgggaacactattaccgtggtatccgcaaatgcaatatgcttttaaagaacatcgacgacgtgcccaaagctacggacgactcggaagaagcacacgctacctatgtgaaacaatacaaggcggaagctcatttcctccgtgcttatttctactgggaaatgtttctccgctacggtcccgtccccctagttacagatgtactcgatccggacggagacttgctcagcaactataccacccgcccttccctgaaagaatatgtagttgacttcattctgaaagaactgaaagattgcgaagaaggattgatggataaagccacttctgccgaatcgggcaaccccggacgtatcagccagccaatggcacgtgcactgtattcacgtgtcatgctctacatggcaagcgaccgtttcagaagtgaatcgggtatcagctggcagcaagccgccgatgcagcgcaaagcttcatgacggattacggaacgctctacggactctatacgaccgataccgatccgaagacctgctataccaacgccatcctgaagaacgcacatgacgagaaaaataatgaaacgatcttctggcgtaatgatgtagctgtaggatggggagcgatctataacgatacacctgtaggcgaaggcggcaacggaggtttgtgcccgtcacagaatttagtggatatgtacgatatggcaaacggacagtctcctttcagcagttatgatgaaaccggcgcccctgtttataacgaaacagccactccggtcatcaacaatgccagcggatacaagagcaatgatccatacagcaaccgtgacccgcgtctggcggctaccgtactctacaacggtgtgaactggggtaatggcatcattaatgtactcaaaggacaacgggataacccgcaaggaaatgccaatgcaacaccaaccggatactatacccgcaagtatattccagaagtgatcctgaacaacaaccataccggcagcaactaccgtaactggattatcatccgctatgcagaaatcttattgaactacgcagaagccttgaatgaagccggcggttcacgctcggacgtactgaacgccatccagcctctccgcaaccgtgtagggatgactgccaaactcacagaccgcagcgatcttcagaccattgccgaccgccgtaacttcatccgcaaggaacgtaccgtcgaactcgcttttgaagatcatcgcgcctgggacgtacgtcgctggaatgtagcggaaaaagcattggcacgtcctatctacggaatggagattaccaaggaaaacggaaagtttgtctatacacgtaaagttgcccagaaccgggtatttacagagaaaatgtatctctacccgataccggaaggagaagtatggaaaacgaatatcgaaaacaacccgggttggaacaattaactgaacgaatatgcaaccgatgaaattaaataacatacagacaggattcaaaagaatcctgctcaccgtagccgcagttttcatgctgggcaacggatgggcgcaagatgctaaagtcctgaaaggacgaatcgtaaatgcagagggtgaacctatcgcaagtgcggtggtcaacgtagcggaagcaagccgcatcgcactctcggacaaggacggtttcttcactttgaagaatgtaaaacctgccgacgagctttatgtaagcagcgtaggttatctgccgacaacagccattgccgactttgaggagaacttcaaaattgtcatggatgccgacctggatgaatatgctcatacaactccgcttcctttcaaccgcaaacccaagaagtttgtgacagagtccacctccatcgtcaccggagaagaactggaaaaacatccggtaaccgttttgcagaatgcgtttacctccactgtcaccggtgtagagacgtatgaggcgcaatccgaaccgggatggagtgaaacggctatgtatatccgtggcatccgtaccatgaatgccagcgcacgcagtccgctgatcatcgttgacaatgtggaacgtgacctctcattcctcgatgcctaccctattgaatcgattacgatattgaaggatgccgccgctaccgctatctatggaatgcgtggagccaacggtgcagtactcgtaacgaccaaacgcggagaaaccggtaagactaaaatcaacttcacacaagaagtcggcttccagactattgccggaattcccgaaagccagaattcttataactatgcgctgagccgtaatcaggcacgatacctggacggattaagtcccgaatattccgatgaagacctggaatactaccgtcgtgtctgcaacggtgagcagttggaaggaatggccaaatacaaatacttcaatacgaactggcacgacaccatgctgcgggatgcagctccgcaataccgtaccaacctgtctgtcagcggtggtaatgcacgtgcacgctactatgtctccttctcttatctccgccaggaaggtttgttcgacaccaaatggacggaatggaacgaaggatacagcacacaggaagtattgaaccgttacaacctgcgttcgaacatcgacatcgatgtaaacaagtttctgaatgtatcgatggacttgggcggacgtatcgacaatatctcccaaccgggcattgacgtatggaacctctttacctggggagccggcgaaaatcttccggtgtatcccgtattctgcccaaacggtgaattctttatgccgaccagcagcgacagtaaaaacggtgccgcacaaatcgccggacgtggtgtggaacagaaccgccgccgtaacctctatacaaccgtaacggctaccggaaacctggatgccctcgttcccggactgaaagccaagatgacgttcagtttcgactcttacgaaacattccagaaggtgcagcaagccgatgtcaatgtctactactataactatatggctgatgtcaacgacccgtcggaatatacataccaacgcatgagaacgtacaaagcattgcccaatgccaccacttctccacgtgactattactataatctcaatatgaacggcggactggcatacgaacatacattcggcaaacatgccatcaatgctcaggcttttatccgtacttatcagaatgtagtacgcggacaggaatcatccaaccgctacctctcttacaatgcacaggctacatatgtatataacaaccgatatatcctttccggtaatatctcccgcatgggcagtgataattatgccgacggcgaacgcttcggaacattccccggcggttccgtgggatgggtactttctgaagaatcatggctgaagaactcgttcgtgaatctcctgaaactccgtgcttcttacggacgggcgggacaagctgtgacaggcgtcagccgctacccgtaccaaggtacattcaccgaaggaagcggatataatttcggtacttcccaatcttacacggaaggtgtatatgaatcgacagccggcaacaagaatatcaaatgggaaatctcagatatggcaaacttcggcgttgacttcgacttgtggaacaagaaaatctacggttctgtggacttcttcaaggaatggcgttccaatattctggtatcccgttccaccgtgcccagcttattcggtgtaaacgctccgcaagactcttacggcaaggccgaaacgaaaggttttgagatcactttaggacatagcaaccggatcggtgattttgaatactatatcgacggtatgctgactttcaacaccaacaaaatcaccgaaatggatgaactgactcccgattacgcttatcaggcaagaaccggcaaccggatcgaccaaagccagctcctgatctggaaacaatgggccagtaatcccgacctgattccggagtcgtatgaagatgccgttgccaatcctcagaaatatccgtggaacgctgccggtaaatacaagctcggcaatgccgtattccaggatacgaacggcgaccgtaaaatagacagctacgacaaagtaccgaccggatacacgaatattccggaattaatcccgaccatccgtttaggtttcagttggaaagggttcgatgcacgtgccgtactgactgcctatctgaaccgtaccgtgccctgccgtgagaatatggactatggtttcggctggggaggtacttccactcacgaaatcaccaatacatggggatattataccgatgatccgacagacccgcgcaatatcaacgccaaatatccgcgtttgtctacttccttcagtgacctcgaccggaactatccatacaatgagtctaccatctgggtagtcaatggagatttcctttcattgcgcaatgtggaagtcggctactcgcttcctgcacgattgatttctaaagtcaatatgacgaaatgccgtctttacttcagcggctacaacctgtgcaactggagccatctgcctaaaggctttgatccggaaaacccgaccaactatatctgggcatatcccaagacacgttcatttacgttcggtgtgaatatcggattctaatcattcaataaaacagcaaagaattatgaaaagaatatcaacttatatagttactctggtcctcgcactcgcaggcagttcgtgcagcgactacctcgacaaagagtacgatgcctccttatctgaaaagaaagtgttcaataaccagaacctgacacgcgagttcctcgccaacatctacacgaatctgccggacggactggcgccactgtcggacgaccagttcacaggtgcttcacgtgactgtatgacggataatgcagtgacctgctggggacttcattattatacaaagatcggcagcgacggatacaccgccggcgaccatcccctgctgggcttctggaacaccgacttatacgggattcggaaatgtaatatgtttctgaagaacgccaaggcatccgtagtaggaaatacggagaaagacggcgatgacaaccgcctttacgaccgttactgtgcagaagccagactgcttcgcgctatcttccatttcgacttaatctgctggttcggcgctgcccctgtcattgcggaagatgaatccggcgaaccgatcatcttcgacttgtccgatccttcggcaatgaacatgttccgtactcccgctgccgaagcacttgaatgggtagccgaccaatgcgaccagatcaaaaaccagctccctttccgctacagcgatgaagcatccaactggggacgtgtcaacggagccgccgcttatgctttaaaggcaagagccctgctctaccgtgcttccaaactgaacaatccggacggcaacaccgcatactgggcgaatgcggcgcaggcagcagccgacttcatcactcagaataacaagcaaagttacccttaccgactgtacaatacgggaaatccagagaatgactattacgaatgtttcacgaccaatccggtatacaacaatgaaattatccttgcacgctctgtatggaataccaatcaggtagaaaaagtattcctgccggtaggctttaccggttctttctccggaaacggacgtaccaacccgacacagaatctggtggacgcttacgaaatgagcaacggcaaacggatcgatgagaacggcagtacctacgatgccgccaatccgtataaagaccgtgacccgcgtctggcacaaaccatcttctatcaaggcatgatgtggggacgtgccgacaaagaagaaagacgtgccatcgacgtacgctacaactcggatgcggacaaaggagtggattacacctcagccatgggaggcacctacaccggatactatctgaaaaagttcgtgaataacatttcctgcaaagaaccggccacctatcctcacgcatggatgattttccgttatggcgaaattctgctgaatgccgccgaagcctataatgaagcggaaggtcctgccaaggcatacagttacatcaatgaggtacgcgcccgtgccggtatgccggcctacgcagatatgtcgcaaagtgaactccgcgaacgtatccgcaacgagagacgcatcgaactggctttcgaagatcatcgtttcttcgatgtacgccgctggaaactatatgacaatgtaacctctacgggagaaaccggaaagccccgttacaaccagttgctgaatctttatggagtgaaggtcaccggcaacgcagatactccctcctataccttcggactggcagaaacggtcaattcacgcacgtttgtcaatcccaagagttactatttcccgatacctgccaacgaagtgaaacgggcacccaatctgggacagaatccgggatgggacaccggaagcgcttctaacgaataaacatcaaaacaatctaaaaaagaaagactgagatatgaaatacttaaagaccatctatcttctactctgttgcacgctcgctctggcagcgtgcagcgacgacgatgaaaactccgcatcaggagctttaagcatcacaacgccggcatatacgaatgtggggtataacaaagcaaccttatccgccaatatcagcggaacggaaggagtgaatatcgtcaaacggggattctgctacgccacggcatcccatccggacatttatgacacgacctccgaagtcagaggatcggaaatcagtacgaccctgaccggcctgactccacagacgacgtattacgtaagagcctttgtcaccctttacaacgaagagcccagatactcggaggaaacttctttcacgactcccgccgagacactgagcgatgaactggcagcgtacgaagcacccacgtatgtagacgactacacaagtttctcagcctggagcaaccgttatgactggaaccttgccaacgtacacgaccctacggtaatgaaaaccgatgacggatattactatatgtatcagacagacgcttcttacggcaacgcgcacagcggaaacggacacttccacgcacggcgttccaaagacctcgtaaactgggagtacctgggagcaactatgagtgaaacgcccccgacatggatcaaagaaaagctgaatgcctaccgtcaggagatgggactggaaccgattgacaatccgtcttacggatactgggcacctgttgcacgaaaagtatcgaacggaaaataccgtatgtattattccatcgtaatcacgaactacatccaaaccggaaaaccggaaattgagaacaacggcaactttgacggttcatggaccgaacgcgcgtttatcggactgatggaaacttccgatccggcaagtaatatatgggaagacaaaggattcgttgtctgctctgccagcgataagggaaagacggattatgggcgcagcagcatcaatgactgggaagggtattttaaaatcaatgcgatcgaccctacttatataataacggaaaatggcgaacactggctgatctatggttcatggcacagcggtatcgctgccctacaggtaaatccggaagacggcaaaccgctgaatgctttgggaaatccctgggacatcacaggggaagacaattcgggttatggaaagataatcgccacacgtggcaccagccgctggcaggcatccgaaggtcccgaagtgatctatcgtgacggttattactatctgttcctggcttacggttcactgtcggtagaatataatacacgtgtctgccgttctaaaaacatcgacggcccttatgtagacatacacggaaattccgctatgggaagcgcgcaactatatccgatactgactgctccttaccggttcgacaacagctacggctgggtaggaatttcccattgcggcatcttcgatgacggagccggcaactggttctatacttcacaaggacgtttccctgtgaacgtaggcggcaatgaatactccaacgccatcatgatgggacatgtacgcagcatccgctgggatgccaacggctggcctctcgttatgcccgaacgttacggagccgttccgcaagcgcctatcacggaaaatgaaatagccggagactgggaacatctggcattgaccaccagtacgggcacccaacgaacgtccgaaacgatgacttatgatctcggtacgcataagataacttccggcagctggaaaaatgctacatggacatttgatgcagcgactcaaaccatcacgacaagcgccggagtagtactctatctgcaacgtgaagtcgactgggaagccagtccgcggacacatacgattgtgtatgcggcccagggtaatcaaaagacatattgggggaagaaactccaataaccctctatagaaaaataaatatgtgttttgctgtcaccgtcacaaagcagagcataactcgcttataatgaagaagtaaagcagtgacagcaactagtgacagcactgtgatggcaatttttgctgtcacagtgctctatatctaccggactttgccgacaggtcatgcgtaggtccattcgtttccatatgccggaaccaacagttccaagcggatgaaactctagtttcaagcagaggaaactttagtttcaaactgaagaaactttagtttcaagctggtgaaactctggttccaagccccagaaactatccagctctatatagaaagagaaaatgcaatataacgatcccgctccgaagacaggaacatgcgatagttttatacgtaacagtaaagttcttatccttttatgttgcacaacatataagagtgtatttgatacaccaaacaaaagtgttacttttacacccaaaataagataagcatctcatttacattaaaaataaaaccatgaaaaaacattttctaattgcaggaattgccgcgctgatgcttgccgcgtgcaataacaagccggcttccgagctgactttatccggtcttgacccggcaaaatttcaaacagaagtgaacaatgcccaaacagctctttataccttaaagaataaggcgggtatggaagtatgcatcactaacttcggcggacgcatcgtgtccatcatggtgcccgacaagaacggcaagatgcaggatgtagttttaggttttgacagcattgctgattatattaatgtacccagtgatttcggtgcttctatcggccgttacgccaaccgcatcaaccaagggcgttttgtactggacggagataccatccaactgccgcaaaacaacttcggccactgcctgcacggaggcccgaaaggatggcaataccaagtatacgaagccaaccttatcgatccgacaacactggaactgactcttatctctccggacggtgacgcgaatttccccggaaatgtgactgctaaagtaacctatcaactgacagatgacaacgccatcgacatcaagtacagcgctactaccgacaaaaagacaatcatcaacatgaccaaccactcttacttcaatctggctggtgatccgtcaaaaacatcgacagacaacatcatgtatgtaaatgcagattactatactccggtagacagcaccttcatgacaaccggcgaaatcgctccggtcaaagatactccgatggacttcactactccgaaagcggtaggcaaagatatcaacaactacgacttcgtccaactcaagaacggcaacggatatgatcacaactgggtgctcaacaccaaaggtgacatctcgcaggtagctgccagactgacgtctcccgaaaccggaatcacattggaagtatataccaacgaaccgggtattcaggtatacacaggtaacttcctcgacggaaccgtaagcggaaagaaaggcatcgtttacaaccaacgtgcttctgtctgcctcgaaacacaacactaccccgacagccccaacaaagccgactggccgtccgttgtgctggaaccgggacaaacgtacaacagcgaatgtatctttaaattctcgacagagaaataatattaacttataaatcaaatttattgtggaagcattagattggctagtaattggagtcttctttttggctctgataggtattattgtttgggtagtcagacaaaaacaaaatgactcggcagattatttcttaggcggacgtgacgcaacatggcttgcgatcggtgcctctatcttcgcatcaaacatcggttcggaacacttgatcggactggcgggagcaggagcttcaagcggtatggcgatggctcactgggaaattcagggatggatgatcctgattctgggatgggtattcgtacctttctattcacgaagcatggtatacacgatgccggaatttctggaacgccgttacaatcctcagtcacgtaccatcttatcggtcatctcactggtaagttatgtattgaccaaggtagcagtgacagtatatgccggcggactggtattccagcaagtattcggcatcaaggaactctggggaatcgacttcttctggattgccgccatcggactggtagttctcactgcactatatacgatcttcggtggtatgaaatcggtactttatacttctgtacttcagactccgattcttctgttaggttcgttgattatccttgtgctcggtttcaaagaactgggaggctgggacgaaatgatgagagtgtgcggtgctgtgacggtaaacgattatggtgacaccatgaccaatctgatccgcagcaacgatgatgcgaacttcccttggctgggtgcacttatcggttctgccattatcggtttctggtactggtgtactgaccagttcatcgtacaacgtgtactttccggaaagaatgaaaaagaggctcgtcgcggtactatcttcggcgcttacctgaagctgttgcctgtattcctgttcctgattccgggtatgattgctttcgcattacatcagaaatatatcggtgccggtggcgaaggtttcctcccgatgcttgccaatggtactgccaacgctgacgccgccttccctactctggtagctaaattgcttcctgccggtgtgaaaggtctggtagtatgcggtatcctcgctgccttgatgagttcgctggcttcactgttcaactcatctgccatgttgtttacaatcgatttctacaaacgcttccgtccggagactccggaaaagaaactggtgggtattggtcagatagcaacggtagtgatcgtaatcctcggtattctctggattcctatcatgcgtagcgtaggtgatgtactttatacttatttgcaggacgttcagtctgtattggctccgggtattgccgctgccttcctgctgggtatctgctggaaacgtacttccgcacaaggtggtatgtggggattgatcgccggtatgatcatcggtctgactcgtctgggtgccaaagtatattacagcaacgcaggtgaagtggcagattctaccttcaaatatttgttctacgatatgaactggctgttcttctgcggatggatgttcctgttctgtatcatcgtagtcatcgtagtcagccttgccacggaagctccgacagctgaaaagattcagggactggtattcggcacagctactaaagaacaaaaagcggctacccgtgcaagctgggatcactgggatatcattcatacagtaatcatccttgctatcacaggtgccttctactggtatttctggtaattaaataaattcattcaaacgatgaaaaactattatagttcgaatcctaccttctatctcggtatcgactgcatcatctttggttttaatgaaggcgaaataagcctgctgctgctgaagagaaacttcgaaccggcaatgggcgaatggtcactgatgggaggattcgtgcaaaaagacgaaagcgtggacgacgctgccaaacgtgtactggctgaacttacaggtttggaaaacgtatacatggaacaggtgggagccttcggcgccatcgaccgcgatccgggcgaaagggtagtttcgattgcctactatgcgctgatcaacatcaatgagtacgaccgcgaactggttcagaagcacaatgcttactgggtaaacatcaacgaactccccgcactgattttcgaccatccggagatggtcgataaagcacgggagatgatgaaacagaaagcatctgtcgagcctatcggattcaatctgttgccgaagctgttcacactgtcccaactgcaaagtctctacgaagctatttacggcgaaccgatggacaaacggaatttccgcaagcgtgtcgcagaaatggactttatcgaaaagacggataaaatcgataaactgggttccaaacggggtgcagccttgtataaattcaacggcaaagcctaccgcaaggacccgaaatttaaattataatcaatatgctggaagaactgaaagaaaaagtatttcatgccaatctcgaattggtaaagcatggattagtcatctttacatggggaaatgtttctgccatcgaccgtgaaacgggactggtagtcatcaaacccagtggagtcagttatgatgatatgaaagcggaagatatggtagtagtggacctggatggcaaagtcgtcgaaggacggctgaagccatcctcagatactcctactcacgtggtactctacaaagcattccccgaaatcggcggagtggtgcatacccactctacttatgctaccgcatgggcgcaggccggttgtgatatccctaatatcggaacaactcacgctgactatttccatgatgcaatcccctgcacagcggatatgacggaagctgaagtaaaaggtgcctatgaactggaaaccggaaacgtgatcgtaaaacgtttcgaaggcctgaaccctgtacatacaccgggagtattggtcaagaatcatggtcctttctcttggggaaaagacgcacacgatgccgtacacaatgcagtagtgatggaacaagttgccaaaatggcaagcattgcttatgccgtgaatcccaatttaacaatgaacccgctgctggtagagaaacacttcagccgcaagcatggtccgaacgcttactacggacaataaaacgagtaaagattataaattaaaaattaaaacattatgaataacgtatttgatcagtatgaagtatggttcgtaacaggagcacagctcttgtacggaggtgatgcagtaatcgcagtagacgcacactctaacgaaatggttaacggtctgaatgaatcgggcaaacttcctgttaaagtagtatacaaaggaacggccaactcttctaaagaggtggaagctgtattcaaagcagccaacaacgatgacaaatgtgtaggcgtcatcacttggatgcatactttctctcctgctaaaatgtggattcatggtctgcaacaattaaagaaaccattgctgcacctgcatactcaattcaacaaggaaattccttgggatacaatggatatggactttatgaatctgaaccagtcagctcacggcgaccgcgagttcggacatatctgtacccgtatgcgcatccgtcgcaaagtagtggtaggctactggaaagaagaagaaacattgcataagattgctgtctggatgcgtgtttgcgcaggttgggctgactctcaggatatgctgatcatccgtttcggcgatcagatgaataatgtagccgtaaccgatggtgacaaggtagaagcagaacaacgcatgggctatcatgtagattattgcccggcaagcgagctgatggaatatcacaaagatatcaaaaatgctgatgtagatgctttggtagctacttacttcaatgactacgatcatgacgcttctctggaagacaaatcaaccgaagcttatcagaaagtatggaatgctgccaaagccgagcttgctctccgtgctatcctcaaagcgaaaggcgccaaaggattcactaccaactttgacgatctgggtcagactgacggtagctatttcgatcagattccgggactggcttctcaacgcctgatggcagaaggctacggattcggtgctgaaggtgactggaaatcggctgctctttatcgtactgtatgggtaatgaatcagggacttccgaaaggctgttcattcctcgaagactatacactgaactttgatggtgccaacagttctatcctacagtcacatatgttggagatctgtccgcttatcgcagctaacaagcctcgtctggaagtacacttcctcggcataggtatccgtaagagccagactgcccgccttgtgttcacttcaaagacaggaacaggctgcaccgcaactgtagtggatatgggtaaccgtttccgtctgatcgtaaacgatgtagaatgtatcgaaccgaaaccacttccgaaattgccggttgcttccgcactctggattccgatgcctaacctcgaagtaggcgcaggcgcatggattctggccggtggaactcaccactcttgcttctcatacgacttgacagcagaatactgggaagattatgcagaaatcgcaggcatcgaaatggtacatatcaataaagatacgactatcagctgcttcaagaaagaactgcgcatgaatgaagtatattatatgctgaacaaagcgctttgctaaaaaacaatcactgagtccacttaaaaaaatcggtaccatctccattggtaccgactttttagtcacacacaatatggatactggcgacttttaattcaacccgaattaaagacacttccgccttttgaaagcagactcagtttttgttctccacacttattgttataccttaaaatatcggtttccaacatgaaattagatgcaaaatcaaccatcgagacaggtaaagccatccttggcatagaactcggttctacacgaataaaagctgttctgattgaccaggaaaacaaacctatcgctcaaggcagccacacatgggaaaatcaactggtcaacggactttggacttacagcattgatgccatctggtccggactgcaagattgctacgccgacctccgctccaacgtgaagaaattatacgacacagagctcgaaacactggcagccatcggtgtcagcgccatgatgcatggttacatgcctttcaatgaaaaagaagaaatcctcgtgcctttccgcacttggagaaataccaatacaggccgtgctgcggcagaattatccgaattatttgtctataacatccctttgagatggagcatttctcatttgtaccaggctattctggacaacgaagcgcacgtcaaagacatcaagttcctgacaactcttgcaggttatgtacattggcagataacaggcgaaaaggtgttgggcattggtgacgcatcgggtatgctccccatagatccgactaccaacaactattccgccgaaatggtggccaaattcaacaatctgattgcttcgaaagaatacagttggaaactggaagacattctgcccaaagtattgtcggctggtgaaaatgccggtgtcctcacaccggaaggctgtaaaaaactcgatgcatccggtcatctgaaggcaggaataccggtctgcccaccggaaggagacgcaggcaccggcatggtagcaaccaacgccgtcaaacaacgcaccggcaacgtatcggcaggtacttcttctttctctatgatcgtattggaaaaagagttgtcgaagccatacgaaatgatcgacatggtcaccactcccgacggaagcctcgtagccatggtacattgcaacaactgtacttcggatcttaacgcatgggtcaacctgttcaaagaataccaggaacttctgggtatacctgtagatatggatgaactctatggcaaactttataacattgcccttaccggtgataccgattgcggtggtctcctctcctacaactacatttcaggcgaacctgttacgggacttgccgagggaagacctttgttcgtacgttcggccaatgacaagttcaaccttgcaaactttatgcgggctcatttgtacgcctcagtcggagttctcaagattggcaacgacatcttgttcaacgaagaaaagatcaaagtcgacagaatcacaggtcacggaggattgttcagaaccaaaggagtcggtcaaagagtacttgcagcagccatcaactcgcccatatctgttatggaaacagccggtgaaggcggtgcatggggaattgccctgctgggttcttacctggtaaacaataaaaagggtcaatctcttgccgatttcctggatgaaagtgtatttgtcagcgatgctggtgtcgaggtatcacccacacccgaagatgtagccggcttcaacacatacatcgaaagctacaaggcaggtttgcctatagaagaagcagccgtcaaattcaaataagcggcttcacggagacctttctccccctttccctgaatttagtattaacataaatatcctcattccctctcctttttggagggggtcagggggaagctattatcatgaaaaccacctcgttcatacttgcccttattatatccatctccatcggaaaagcccagacgaaccatcaggtctcttacttttcccttcaagatgtgaagttattaagcagtccttttctgcaagctcaacagactgatttacattatatcttagctctcgacccggacagattatcagctcctttccttcgcgaagccggactgacacccaaagccccaagctataccaactgggagaatacaggactggacggtcacatcggcggacattacctttccgcactttccatgatgtatgccgccaccggagatacggcgatataccaccgtctcaactatatgctcaacgaactacaccgtgcacagcaagctgtcggcacaggatttatcggaggaacacccggtagcctccaactttggaaagaaatcaaagcaggtgacattcgtgccggaggcttcagcttaaacggcaaatgggtacccctctataatatacacaaaacgtatgccggactgcgggacgcttacctgtatgtccacagcgatctggcacgtcagatgctgattgatctcaccgactggatgattgatattacttccggtcttagcgacaaccaaatgcaggatatgctccgcagtgaacacggcggcttaaatgaaacgtttgcggatgtagcggaaataacaggcgataagaaatacctggaactggcacgccgtttctctcataaagtcattctcgacccgcttatcaaaaacgaagacaggttaaacggaatgcatgccaacacacaaattcctaaagtaatcggatacaaacgggtagccgaagtttcaaaggatgacaaagactggaatcatgcagcagaatgggatcatgcagcccgttttttctggaataccgtagtcaatcactgttccgtgtgtatcggcgggaatagcgtacgcgaacattttcatccatcagacaacttcacgtctatgctgaatgacgttcagggaccggagacttgcaatacttacaacatgctccggctgaccaaaatgctttatcagaactccggagacgttgacaactccaacaaaccggacccacgttatgtagattattatgaacgtgcactctacaatcatatcctgtcatcacaagaaccggataaaggcggattcgtctactttactccgatgcgtcccggacattatcgggtatactcgcaaccggaaacatcgatgtggtgctgtgtcggttcaggcttggaaaatcataccaagtatggtgaatttatttatgcgcatcaacaagatacgctttacgtcaatctttttattccttcacaactgaactggaaagaacaaggcgttacattaacgcaggaaactctcttccccgatgatgaaaaagttaccttacgaatagacaaagccgctaagaagaacctgacattaatgattcgtataccggaatgggcaggaaactcaaaagggtatgaaatcaccatcaacggtaagaaacacctatctgacatacagacgggagccagtacgtacctcccaatccggcgtaagtggaaaaaaggagatatgatcaccttccatctgcctatgaaggtcagcctggagcagattcccgacaagaaagattactatgctttcttatacggtcccatcgttcttgcaacttctacaggaacagaaaaccttgacggaatctatgcagacgacagccgcggcggtcacattgcccacggtcggcaaacacctttgcaggagatcccgatgctgatcgggaatcccgattctatccgccattctcttcacaaactgagcggaagcaaactagcttttagttatgatggaaacgtttatccgacacaaaagagtaaatcactggagcttattccgtttttccgcctgcataattcccgttatgccgtttacttccgccaagccagtgaagaacagttcaaaacgattcaggaagaaatggctacagccgaacggaaagcgaccgaactggcgaaccggacagttgacctgatcttccccggtgaacagcaaccggaatctgatcatagcattcaatatgaagcttccgaaaccggaacccacaaagaccgtcatttccgccgggctaaaggttggttcagctataacctgaaaataaaagaagaagcaagccagcttatgatcaccgtacggcaagaagaccgtaacaaagcagtgatcctgctgaataacgaaaaactgaccgttcatcccactgtgagcaaagccgacaaagacggttttatcagactctgttatctcctgccccgtaaattaaaagtaggaagctgcgagattctttttaagccggacggaacagaatggacctctgccgtttatgaagtacgcttactgaagtaaccgtaagaacaagagaatgatcatcgtaaaaatcaaacttctatataatcatttaaacaaattccatttatgaaagcaaaactattagtcagcacggcctttctggcagcctcggtatctctttctgcacaaaagagtgctaccatcactgtacatgccgaccaaggcaaagaaattatcccgaaggaaatctacggtcaatttgccgaacacctgggttcatgtatctacggtggtctttgggtaggcgaaaattcggatattcctaatatcaaaggataccgcacggacgtatttaatgcattaaaagacttgtctgttcctgttctccgctggccgggcggctgctttgcagacgaatatcactggatggacggtatcggtcccaaagaaaaccgcccgaagatggtgaacaacaactggggaggaacgattgaagacaacagtttcggaacacacgaatttctgaacctttgcgaaatgctgggctgcgaaccatatataagtggaaacgtaggcagcggcacggtagaagaactcgccaaatgggtggagtacatgacttccgacggtgattctccaatggcaaatctgcgtcgcaagaatggccgagacaaggcatggaaagtaaaatatctcggtgtaggaaatgaaagctggggatgcggcggcagcatgcgtcctgaatattatgccgatctgtatcgccgttattctacttattgccgtaactatgacggtaatcatctgtttaagatagccagtggtgccagtgattacgactataactggacggatgtactgatgaatcgtgtcggtcaccggatgcaaggtctatccttacactactatacagttacaggatggagcggcagcaaaggtgcggcaaccaaattcaacaaagatgatttttactggacgatgggcaaatgtcttgaagtggaagatgtcatcaaaaaacattgcgccatcatggacaaatatgataaagacaagaagattgcccttttgcttgacgaatggggcacttggtgggacgaagaaccaggaacggtcagaggtcatctgtatcagcaaaacacattgcgtgatgccttcgttgcttctttaagcctcgatgtattccacaaatataccgaccgtctgaaaatggcgaacattgctcagatagtcaacgttctgcaatctatgatcctgactaaagacaaagatatggtacttactcctacttattatgtatttaagatgtacaaagtgcatcaggatgcaacctatcttccactcgacctgacttgcgagaaaatgaacgtacgcgataaccgtacagttcccatggtcagcgcaacagcttctaagaacaagaacggagtgatccatatttctctctccaacgtagatgcagacaacgcacaggaaatcacagtcaatcttccggacgtaaatgccaaaaaggcgattggagaaatcctgacttctgctaatctgactgattacaactctttcgaaaaacctaatattgtaaaaccggcttccttcaaagaggtaaaaatcaataaaggaattatgaaggtaaaactaccggctaagtcaattgttactttagagttacagtaatctaatagtaaatacttactgtattgtaaacaagaaggctgttaaaaagcctacaaaaaagatagctcttttggatggttaattacacataaagagctatctttgccaacattatgagaaatatgccaagtaattggcacattgacagactagcaaatctattaattattaaagatatgaacgataataaacttatgaatcgtgcagcggataacatccgtattcttgctgcttcaatggttgagaaagccaattccggtcacccgggtggcgccatgggtggtgctgactttgtaaatgtactcttctctgaatttctagtatacgatcctgaaaatccgcgttgggaaggtcgtgaccgtttcttccttgatccgggtcatatgtctccgatgctctattctacattggcattgacaggtaagttcactttggacgaactaaaagaatttcgccaatggggaagccctactccgggacatccggaagtagacatcatgcgtggtatcgaaaatacttccggtccgctgggacagggacatactttcgctgtaggtgccgctatcgcagctaaattcctgaaagcacgcttcaatgaagtaatgaatcagactatttacgcatacatttccgatggtggtattcaggaagaaatctctcagggtgccggacgcattgccggtgcattgggactggacaacctgatcatgttctacgactccaacgatattcagctttctacagaaacgaaagatgtaaccgttgaagacactgccatgaaatatgaagcatggggatggaacgtactcagcatcaatggtaatgatcctgacgaaatccgtgcagctatcaaagaagctcagacagaaaaagagcgcccgactctgattatcggtaaaaccgttatgggtaaaggcgcacgcaaagcagacggtagcagctacgaagccaactgtgctacacacggcgctccactcggtggcgacgcctatgtaaatacaatcaagaatttgggtggcgatcctgtcaatccgttcgtgattttcccggaagtagccgaactgtatgcaaagagagcagcagaattaaagaaaatcgtagctgaaagatatgcaaagaaggccaaatggaccaaagccaatccggaactggcagctaaactggaagcattcttctccggcaaagctcctaaagtagactgggctgccatcgaacaaaaagcaggtactgccactcgtgccgcttctgcaactgttctgggtgctcttgcaatgcaggtagaaaatatgatcgttgcttctgccgacctttctaactctgacaagactgacggtttcctgaagaaaactcattctttcaagaagggcgatttcagcggtgcattcttccaggccggtgtatctgaattatcaatggcttgtatctgtatcggtatgtcacttcacggtggtgtgatcgctgcttgcggtaccttcttcgtattctccgactatatgaaacctgccgtacgtatggctgctctgatggaacagcctgtgaagttcatctggactcatgatgcattccgcgtaggtgaagacggtcctactcatgaaccggtagaacaggaagctcaaatccgcctgatggagaaactgaaaaaccacaagggacacaactctatgttggtacttcgtccggctgatgcggaagaaacgactatcgcatggaaacttgccatggaaaatatgtctactccgacaggtctgatcttctcccgtcagaatatcgctaacctgcctgccggaactgattacgaacaagcagccaagggtgcttatatcgtagccggttcagacgaaaatccggatgtaatcctggtagcttcaggttccgaagtgtctactttggtagccggtacagagttgcttcgcaaggatggcgtaaaagttcgtatcgtatctgcaccatcagaaggtctgttccgcagccagtctaaggaatatcaggaatcagttcttccggctgatgccaagatattcggtcttactgccggtttgcctgtcactcttcaaggtctggtaggttgccacggcaaagtatggggattggaatctttcggtttctctgctccttacacagtattggatgaaaaacttggatttactgccgagaacgtatataatcaggtaaaagcaatgatttaatgaaaacaattggattagcatgcgaccacgccggttttgaactaaaagaatatgttcgcggctggctggaagtaaaaggctgggcttacaaagatttcggaaccaactctgccgcaagcgtagattatccggactatgcccatccgctggccctagcagtagaatcgggtgaatgttatcccggtattgcgatctgcggcagcggaaacggaatcaacatgactctgaacaagcatcagggaatacgtgctgctctttgctggaatgcagagatcgcacatctggcccgtcaacataatgacgctaatattctcgtgatgccgggacgcttcatcagcactgaggaggcggacatgatattgacagagttcttctcaacacagtttgaggggggacgccatcaaaatcgtattgataagattccggtaaaataatgcctgaaaatctataaaaataaggtggaatatttaataaatatcccaccttatttttaaaacatgaggctcaaggaatatataaccatagtctttgtcttcattttccttctatatctttctcaagttaaagccatctactataacacatctgttgaagaagattgctatatacacttatgactaagtttaccattgaacaatgtaataagacaatcctatttccaaagagggaacaattaaatgaaatttttcacgagggcgtatagacaattcacctatactggtatttttgtgaagtcctttaattttagcatacaaacaattcacacccaacctaattcccaagcgggagtcaaaagcatattcataagcaatccccatattgcctcccactgtcgaacatgttgtattataattctccaactgcgatattgttcccttacttctataattaacatatccaataccagcactcacatacataatcccatccaaaaatccagcctgccgtttaataaaagaaatctgcggagctacataatagaacgattttttttcattgattcccgatgatagcactccatcatgtttctttgtaccattactatagtcataataaaacaatccacatcctatattactgtaaggggtataagtcatcaattgtattgaagaaacaaaaggaacatcatttttattatttcctatataccaagagctgcttccatttttttgtataccagtaaaaccaatccctaacccgacatccaagatatatactcgtttatatgactcgttattagttgaaacattcagtgaatctttctgagcatacaaagagttgatactgaacatcaaagatattaatcccactagcaggcatttgttttgtttcataataagtgtgtttaataaaaagagaaaaaacgaaagctcccttaatcaatcatcattttgtttcaacccacaaaaatttgctattttcagcaatagctatcatagtttttaatcgagaaacagctgatacatctaaagatgaagcatcaatttgggcatatacttgtttagtataatcacgaacagttgatttatcatccatattcactaaaccattaatataactctctacaagctgaaattcagatactcgctgaggaaattcttgcttcattaaattcatcagttgatcaacagaagtacttttcttaaccagatccattatttccagcaatcttgtctgaagcaacaggggcatttcttctgtatatccataacttttcaattttttgttagtagaattatataaataataattagaaaaagtaccattagctattacgggatcttccctcatcatattatatattgtcttattatgatcatttccaattatttcataaggtcttaacggagcatcgtataccttccaatttgaactcaaatgccaccaatttctaggaagatcatcatctgaagccgcacaaataagtgagaatacaacagccgtaatcaagccacctctaggtgttaaacctttatttactccccaaccataaccccaagcatctcctacaagaaaacactttattcgattccaaaagggaccacgagtctgtattttattagcattcaaggtttctataaagtctattaactcttgaatttcaacatcttgtgttttttcttgattttgttgtgtatttataacaacatcatttgagtttgaacaagaataaaaacaattcattacaagtagtaatgagacacaaaatacaatttgcttaatcgtcttcataatttcaatttttaaagtaggtactattaaagaattacattgcatcatttttctatttgccattataccaaaagagaactatatgatactaatttaacaccaaatatattcgttatttttgtaacgtccaacttattatcgcataaagtgtaataatttcatcctctccagtacattatccgccgagatattttatataatatgccattaagatcaatgaaatgttcagtctaaaatccttcacttacgttgattctagtgcgtaaaatatcatagatacaattatgacacatagttttttataataatcatctattttttatgcaaacttcaagattacaaaagaacaataatatcgtcttactatatgacgaagttaaaaaacagaagttatgggtaaactgaatatgaaagactggatcggtcagacgatcctgaataaaaaggtcatttccattcctatcatgacacatccgggcatcgagcttatcggaaagacggttcatgatgcagtaacgaacggacaggtgcattatgaagcaatcaaagcgctctgcgacaaatatccttctgctgccgcaacggttattatggatttaacggtagaggcggaagcattcggagccgaaattgtatttccggagaatgaagttccaagcgtatccggtcgtttgctcgcagacgaagctgccattgagaccttggaaataccggcactgaataaaggaaggattgcacaatatctcaaagcgaatatgctgactgcaaagaatatcacagaccgtccggtgctggctggttgtatcggtccttattcattagcgggacgcttatatgatatgtctgagatcatgatgctgatttatatcaaccccgaggcagccaacactttgctgcgcaaatgtaccgatttcattattcggtactgtatggccctgaaagcgaccggagtgaatggagtggtaatggcggaacctgctgccggattattatccaatgaagattgcctgcaatactcttctgtattcgtaaaagaaatagttgagaaggttcaggatgatcatttcaccgttgtacttcataattgcgggaatacaggaaattgcacccaggctatggtatatacgggtgcggcagcctatcatttcggaaataaaatcaacatggaagaagcattgaaagaagttcctgccgatgctcttgcgatgggtaatcttgatccggtcagcctttttaagatgttgagtccggaggaaatgaaaaaagcgactctccagttattggaagccacttccgcatatccgaacttcgttctgtcgagcggttgcgatataccgccatatacgccattagctaatataaatgctttttatacagcattggaagagttcaatgaaactcgaaattaggccgtcattcagctaatgtcagttaataatgattgagcaagaactcacttatcaagacttacgaatcctatcgtccgaaatttatgaagcgatggggtacaaagattctataccggatcagatggtgatagatgagactaatacgttgctaaaacgggttattcccctgcttcgccctcggttcgcattcttctttatggaaggtacacttgatatcgaaaaagagactcttagcgtacaaagcatccatccacccactgtcaatcctatacaagacaccattcccacacggagccctgagcaaaacactttttctacacaaagtaaaagtaccgttttctctgttggtaaaaccatcgcccgtcaattaagaggatcggaagcgtttgtcttttttgcagctactgccggaactgagtttgaggtattccagcatacgttgcaacaagaagaagatatggtcaaaatatacatagcagactcgttagggagtattattgcagaaaagacggctgattgcatggaagtcgctttggctgaatatatacgggagaagaactggaaacataccaaccgatacagtccaggatactgtggatggcacgtttcggaacaacaaaaactgttcccattgttccccatagctgctcccggtggcatccggttgacagattccagcctcatggtccccatcaaatcagttagtggtgttatcggaacaggcactaatgtccgcaagcttgaatacacttgcggactgtgcacctatgaaaactgttatcgcaaaagaaaacacagataaatttgcgattgggggctgactaaaagtcgatagtatcttctttaatggccattaaagaagatataaagccctatcatagttacgataagcaacccccataagataagtacaatgcgggcaggcttttcttcgatcttctccatattcaatattgccgtctgaggagtcttatccaatagactgacaactaccatccctatcccgataataacgaacagatagaaggataataacataaaatgaggccatgcagaatattgatccgcaggaaatacccatagatacaatacacctactcctatactgaataccgtccccactgtcagggcagcgttagcagccaacgtagtcgtacgcttccagaaaacgccaaaaaggaaaactgccgccataggaggtgcaatgaatcccaatacagactggaaaacattgaataaattcaatccgtgaatgctgtcaatggcaatcgttatgattaccgatatcagagcaccggctaccgtcaccacttgtccgacccagatgatctccttctgcttcgcctgcgggcgaatcttcttcacataaatatccattgtaaacacggtactcaaagcattcaatgccgatccgatagtactgacaagcgcggcagtcaacacagccaacaccagccccaccatcccgacaggaaacaaatgggttaccatcgtcatatacgcctcatcgggattctccaactgcggaaacaaggccagacagatgatacccggaagaatataaagaggaacatccagtattttgagccatccggtaaagttcgttcccaactgtccttctttcagacttttggctgccaacacaggctgtaccatcgactgatccgtacaccagaaccatactcccatcacaggatatcccaaaataatcggcaaccaagggaaagcggtatcatcattcggtctgaacagattccagaagtctgccggaacggcatctgtcagagccgatataccaccaactttatagattcctacaatagccaacgcagccgaaacaagaatcaacaggatcatctgataaacattcgtgtaggcaaccgctttcaatcctccgagcatcgtaaagaatgcggatatgatcagcaatatcaaagcggattgccacatcggtatatcgaatacctgacgaatcagaacgccacccgcaaacaatgtcaatgccagccaggaaatcaagattgtaacaatcgtataccatgccaagatattacgggtagactgtccgaaccgctttcccataaactccggcaaggtggaaacacgagaacccaagtaacggggagcgaaaacaaaagcaagcaggcatataaaaacgaaggcataccaggcataattgcccgaaacgatgccggtagtaaatccggcactggcagaagctatcaacatagacggccccacattagtcccccacatggagaatccgatatggtgccatctcaaagaatgttccgccaaaaagagactgctccccttctttcgtttggaacttgcccatataccaatggcgataagaatcagaaaataggcaatcagaatgccccaatccagtgtgtctaagaatttcgcatgcataattcaagtattaacaattaaaatattcttaatctcttttccccatcagcactttggcgaccgccacggcagtattagcattatcactatacccgtcagcaccgatttcatcggcaaatccctgactcacgggtgctcctccgatcatcactttcacctgatcgcggatccccgcctcttccaatgcccgaatcacatcctgcatataagtcatagtggtagtcagcaaggcactcatacataagatgtccgctttgttttccttcaccgcttcaacaaacttgtcgcaagtgacatcaataccgatattaatcacttcgaagccacaaccttccagcatggaagccacgaggttctttccaatatcatgcaaatctccttttacagtaccgatcacaattttcccgatagtagcagatgcattccccgccagtaaaggtttcaaaagttccaaagctcctttcatggcacgccccgccatgagaagctgaggaacaaaggccttgccgtcctgaaaacgctgaccgacttcgcccatagccgtaatcatataaccattgataatatcctgcgggagtaccccggcagcaatggcatcctttgtaacttcaacagccggttccaattttccggctacaatggcatcatacaaaggtttcatccgatcctcttcctgagacttttcttctctgatccgaatactttcctgtgcattatcctgttctccaacgggttgattcgtgtgaacatctgcagacacagacgaagaagagccggtatattcctcaatgattctcattgcctgctccacttccctctcattgtggaaatccatttccagatgcactccgtctgccccgatatggtccaacaaaggtttcagttcctccagagtcacccagcaagccattacgctcttgcctcctgccagtatcttcttatataaatcgtaccacttcggagaacctccctgcggctcgccgacaccgggcgtccattggatggcattcagttcttcaatctccagcaaggcgggaaggtgatgcatcgctcccactccatcaagatgatagagcgtataatcgattttctgacattgctcacgaataaacggctgcacaaaacgacgataatcatcctgactgatcatggtagaaatatcgctctgcaacttactcatcttgcccggagcccatgaagagaaatagcagaatgccatttcatccccttcacggataatgtcgtagagttcatcaaagactttaaaatagatgtcattgatctgctgcatctgttgctccagcacttcgggttgcatcaccgtatccagcaataccatatccgtacctttcaaagctgccaatacatccagtccttccatcaggtcgggcataccaacaaagtagtttccgttggctttagccttacaggctttcagaagttctttatgcaagagccagttcggatgttcgggattgaatacgatctcatcattaaagttcggatcgggatgtatccagatcgtatcttcgcctccttcaaatactccgcccagaatagcagccagcgagccgggacccaactgagtatttgcaacaggcagcatatccgccatcagactactgtgagcgacataccaatccagatattccgcccgccattgagggtcgaaccacttctgcgacaaatcccttgccggagcaggtggagcaatgtcggcgtgcggtttcacgccttcctgaaagtgttcccacatagaaagaataattcctttatgattccaccaatttatataacgctgtttcgtttcttctaagtttgttttccaagttttcatcgctattctttatttagtccaaaatcctttgtaattatgatctatgcgcaaggcaatacttttgcctaaatccatctcgtccgtacaattcacttcctccggataaatcgggataacggcattctcacgcacataaacaggcatctcttccaagggcacatacacctctttcagccagcgtccgccttgcaaccgttcgccggtaaagaaattcacccactgtccttcggggagataaatgtcgcgacggttttcgctattcatcaccggagctaccaggaaatcattgccgaagtaatattcgtcatcgatatgccagcagagtttatcttccggatgatgcaggatgagtgcctgtaacaatggccagccactttctactgccagtttactttgctctatgatgtagggaatcaacgagtagcgcagtttccaccacttcttcaccagcggggcgatagccggataatgccagggttcccgcttattggttccatgataacggatatgtgaggtgaacactccaaactgggtccagcgcatatagacgtcctccgctacgattgagttcataaaattgggcaaggtatggaatccggggacatcatggctccagaaggcaaagcccgataaaccgaagtgcaggcctcctttgagtgaaccggccatgccatcccatgaactgcaggagtcacctccccagtgcaacggataacgctggcaacccgcccaagcggcacgtgcccagacaatgccgtcccctgttacctcctttgttatttcgtaagctgctttctgatagagcaaggcatacaggttattcaacagttccggtttcatgcccttgtagacagcatccatgtggatattttctccgaaatcggttttaatacaggtgactcccatatccagaagttgctttaatagccccttgtaccattcggttgccttcggataagtaaagtcgatagtacccgcataatccagagccgagaagttggaaccgtccgtgtcctgctgcttcgtcagaggagctatatactcattcgcctttgcctcctcgatctgttccgcatcttcagcaacataaggtaactgccataaggacacacgataaccgttcttcttcaatctctgaatgaatcctttcgggtcgggaaaacgttcctcgttaaacttccattcacacagccagtcggttctgaaccatccggtatccagatggatgacatcgcagggataatgttcggcacgcatacggtcgcagatctcatttacttcgtcggcactgaaataagtcatccggctcatccacactccgaagctccagagaggaggcatcgaaggatatccggtcaggtcacggtagccgcgaagcatctcttccatcgtatcgccggcaatgacaaatgcatccagcatagcctgatcgctcaggaactgtacggagcgggtggaatgtcccgccagcgaaagtttgctgtgggcgcaggtatggtaaaaagtcccgtacatccggctggagagatagaaaggtatattcttataggtacgccggttatttactccctgcccatcctgattcttgaggaaaagcgtctgtccgctcaagtccattttgaagaaacgctctccggttcctgcaaagcattcatccggccggctctcgaaagaaagggtggcacgttcctttttgcccgtccatttgcagaaggcaatgggcagtccgtcatagcggggaggcgagaaatgatcgtatgctgccaggcggatttcccgtttgccgtcaggatacagagtgatgtccagtgtttcctgaggatcgggcagtaactcgctccatcggtccaaagccggctcttctacattgataacggcacgcttcgtcccgtcttgggtgaaaagaatccatttgcctccctgcttctctacagacaaaggtactctgcgaatccgttcgctgaattgcagcatttccgactgatctgtcagttcatattcaccaaatccaagaaacagacgggtaatgccgatattatactggcgtatgatcaacgtatattcttctcgggggacagccgtatccgcaaccatatcattagctaacagctgtttttgaaaggggaccgtgacacagatatccccatccttttcgtaaacggctgtcggtttacaggctttccaaagtgactcatcccttaataactctgtatcgaaatcaaggaaatcgaacaaatggtaattagtaggtttcatttatgatctattattattagttttatctttatttatctatactcatgcagacttcacaagtctctatggccccactttttgcacagcccgacactgcgataggctcagtgtcggactgtacttactccggttttatccttccggccttattcttaatgctttctgtcacttgtggtccgttatttttccatacattccgattgccgggacgattcgagtcgaaacgttcagtcggacaccagttgttttcaatcgtatatccgtccgtagcttcatccaaataaatataaaaggccctgtcattggtggcgtaaggtgcttcttcgagatgttcgatccgattattccgcatcacggagcccggttggttggaaagcgtataaagtcctccggcatcatacagacgacgggcaaagtgatgtacgtagttggcttctatccggttgtttttcattccgctttccagcgatgtccacccccagccgacacaaatacccgaataattcaagtgacagacttcattatgggaaatgtcgataccgatgacgtatcccgcaccgatccccacgcacccccagtcttcattggtcacatcggtgatcagattatttttaatggtaatgtccgtgcataggttacgttcttccggagggatgaaaggcacatgcgtctcaaaacctccgtcggggaatgcaccaatcagtatgcctgtaccgccgatatccgaaaagacacaattctctatgccggaagatgaaacagcccattcataatccagtccggtagatgctagatgccggaacctgcagcgactgaacgtaagatgctcagtaccccgtacacgtattgccgtttcggggcgtgcaatccacgcctggttctccagttctgctttctccggaagtcccggttcatgcagtttataagcatccagcagaggaaaacctccttgcaaagtgacatgtccctgataggaaggacgcatccatgaagtatgggcaaaggtgattccttccactcgaatatgccgcaccgggcgttccaatgtgccgtctacaatcatcaatgtttccagagcaggaacgatcacttcggcagtctccatatcttcttccgagcggggataatagtagattgtccccgacggatattcctgaaaccactctccgggttggtccagcagttccagagcattcgtcaggcaaaaggaagagttgcctttctctcccccgatgacgggctgaggccacggatgagcaaactccagatgactctccggttcgtgaaagcgaatgacagcctgttctcccctgacgtctatactcttcacacgcagaatggcaatcgcccaacgttgatgaactatcatttccagttgacgggcattggggaggtttccgatctgagaagcagggattgttatcgtctgttcttccggattgaaatcaatcatccgttccatcactccatcgggaaactgtgccgcccgctgggccttgttgccgtctacccacatctggcgggtttctacgattctatttccaaaggatggcgcctttgccacccatatttttgatcttaattcctttgtaatccgaggatcatcacatccctttttccatccggtcactgccactccgccactgatgacaggatgcgcattctccaccgcacggatgagtgtcggagaatcgggcgtgccgctatcctccggtcggataaacaaaggagcggactgtgcataaaccccgtcttccaaacagatacaaattcctccggccgcctcgggacgattcagccttctccattcacgagcctgcttgatggcgcgattcaaggtaagataaggagcttctttggtacctgcattcctgtcactcccatgcggagaaacataaacctcgcctgcgacgagaactgaaaataaacctaaagaagccataaaaagaagaacagtaaaagtctttttcatggtacaatctcaatgtgctattgtagttaggacgggtacacatcaatttagtactctatctggcttacaaaaaataagttagtacaagaattatccatcgctttctgcataaataaagttactaacggctaaaattttgttcaaacctgtttaaaaatgaatcaaacagtagtatctccattggggatgacccaaaagtcggtagtatctccattctcctccttcgggaagctaccctttatacacaagtatatattattttttttatctttgcttgatgttattagagacagatcaaattcgtgatcctcggcttttgcggcgtttaaacttaatttgctctcagatggttgtccatcaaagtgctatagtgaatcaatttagtaaggaacataaagaaaagatgggtgcttatagatttttgaacaattcctcagtcagctctgatgctatcttatcaggtctgatacacacttgctgtaagaatgcttccggtcgtaagcatttactgtgtattcaagatacctcggagataaactatgaggctcatgttgagcgaatgaagaaaaaaacagccagtcccggcattgtcggtcaaaagcaatgtggtacttttttgcatcctgtcttggtagtggatgcctccagtcatattcctataggcttttcttcggttaagcagtggaatcgctcaccggctgctttaagtcgtgaagaacgtaattacagatatcagcctatagaagaaaaagagtcatatcgttggatagaaagtggaatggctgccagtgagcaaatgccccgggatgcagttaaaacgatcatcggtgaccgtgaagcggacattttcgagcttttcagccgtatccctactgataatgttcacttgctgatacgttctgttcatgaaaggaattgccggttggatgatccagactgttctgtccatctgaatacattaatggagcaggctgttctacgggcagagtatagctttgaagtgctcccgggaagcggacgtaagaaacgggtagcgtgcatggaacttcgctttgaaagagtcactttgtgcgctcctgttaacggtccggcaaagggcagtccccctgttagtctttattgcatacatgttaaagaaaaatcttccagtacaccggtaaatgagagccctattgaatggagactgctaactacacatgtggtggagactgtagaacaagcaattgaatgtatcggttggtatcgttgtagatggctgattgaagagttgttcagagtgctcaaaagaaagggattcatgattgaggacgcacagttggaaacagtttcggcattacaaaaactaatcttaatttccttgcaggcagccctgcaggtgatggtactcaaactttcttttgataaagaagatgaaaaactctcttcagaaatctactttacaagcaaagaaatagcattattacatatagtaggaaaaaagagtgagggaaatacaaaaatacagcaaaatccatataaaaaagaatcaatggcatgggcagcatggattattgcaaggttaggagcatggagtgcatacaagagccagtccattccaggatatataacctttaagaatggactggatagattttatacacagtttgaactgtatgagtttatcagataagacttgtgtataaagggtagcttcgggaaggaggagtggtcgaagaccgaggtggtaggagaaataatgtttgttccttttttattgaaaatgatagagtaatgtattcacctaccacctccccctatgggtactcctccttcccgaaggaggagatttaagatactattgactttttagtcagccccattcaagatactattgactatcatttaattcaaaacatacatagaaatgaagtaaatgataatctacgtcatcactattggtatcttatgccatgatttaccgctactttacgcgtagactattaataagaaagtttctcttcattatagataaacttgcattcagttaacaataaagttattttcggcctatttcaatctacaaatgaaagcttcgtttttataaatgcaacttttgtttttataaatacaagttctatttttataaacaaaacttgcatttatagattataattgacagaagataagtttatctactgaataacagaagtttaccattaataaaccaacttctatctattaatagctaatcggttgaaaacgatgaaatccgggtgaaagatgaaagatcaggtgaaagatgattttatgatctatcaccctctgaaacaccgatggataaaaagattgggagatgctggtgataggtgaaagatgattttgcgtttttctttatatagttgtaatcacaacagctaaacaacttctaataaagtatagaacaccgatgatctgaaaataatcaccgaataaaccccattatgaactggtagcagaaataaccgcaaacgacaaacttcagcaaagtgcccaacataaagccgactaatgaaccgactcccgacttcagagcctgggaaaattctttatttccgatcagttcgccgatcactgcccctagaaaaggaccgaaaataactccccaaggcaagaaaagaagtccgacgagagttccaataatgcaaccccagtttccccatttactgccaccactatatttactgccaagcatcggagtaaaataatctaagatctgtatgacaataacaatcagtagccaaacgatcaactgcgtggtagaatattgtgccttatctgtaaaatgaagaagaaccaatcccaaataagcaacgggaggaccgggtagaaatggaaggacacatcccatcaatccggtaatgaggcacaacacacctagtataatcaaaataatatccaacatagtttattcaaattaaaaataataagtacccttgctttattagttcatactacttttatccaataaataacaaagatacctattccggtggcaatttaagcaaataaaccgaatcctccaaaaaacaatcagtaacgtcgggaaggagtataatcaattctataaatacggtcgaagaaaggactccattcattctccgcaatcccaagttgcagaccgtagaaatgcgtatccacttttctatattccagcatcttgtcagtcagttccggcacggataaaggtatcttaaaatcactgatccataacacatccgcattcatatactccttttttgattgaagcaaccggaagatagcttgcagcattcgggtagcatccgtatctccacaagaggtggtggagaaaaattcaagcagccgcgccctctctctccgcacatcaatcggattgatggatacagaaaaggcaatcaggaaacagtcccgacgttgcctgtcagctatttccaatattttaatcagcagcgaatatgcaatcttttccggtttcccgaccatgcttccggaagtgtccagacagactatcatcggtcctttctgcgtagcaggctttatttccagtcgccgtgccggttgcatgatctcggatttatagcggaaggtctgaagttttcgggtaacatatttatagacaaacaagtcttccagctcatcatcggcacaatgcgccagttctgtaggaagcaatgcgttcaggtcattccctactgtgatacccaaaatgtcacttttagaagaatgctccatcttatatacattcccctgcgcgacatgtagctgctcctgtccttcatcgtcagccatacgccccatcttattggcaaccttgaccacttccggatattctttctgaatgcggacaattttgcgtatccgctcaaaatccaccgtattccacataccgctcatcaagccccaagcctgatagaactcgtctttctctatgttattttgccggatatatccggggatattcctgagattggcatgaagtctgcgttcgaaatcatctttgcgctgttctatctccttttccttttgctcctgcaaatcccgttggaaagcctctttccagtcgtccaccatcctctcccagacttcctcatccgcatatttcccttcattgccgaactgcccctgataaaatgccttgtcgaaaccattaccctcatgtttgtcggcaacctcctgtagtaaagcctgccacccgtctttccgcttggtctcggaccattccagcacaagttccattccttgctgttccgactggcttttctgcatattgtacttttgcttttccagattcagacggataaactggctcattgcatcgtaaaagattcgggcacaaagttcatcactcaggacttgtatctttatcatcggatcgttcatgacggaaagcaggtaagcgtacagcggttcgttatccgcctccgcacactctccggtcgctacatacttatccagcacctgcacataaaatgcagcatcatatctaagactcatcgccgtatctcagtttacggacatccacacgtgcccatgcaatctctttacgaagggtcgccacatattgtgccaccccttttttatcttcttcggaaataaaaatattctcagacaagtcttttactaatttctcaatccggtcatgggctgtctccaactccgtctcataatcccggtcggtgagagtcatattgcccagccacaactgctgttgctctcccctcttcagccgacgcatcggaaagcggacaccattgatataaagattcttctcatccctgtaaagtgtcaccctttcggcaccttgttccttcattttggtggcatccgaaaaagtacgtataatcgttcgcttcggattcagcggatcggcatacatgactcctgttgcaggaacatccttcggactgtattctttcagattcttataatccacaataaatatgtaggtatttcccgtaccatgattctctatctgatagtagaaatgatcgatgatcatcaaatcatcgtccctgcggtcacctttctgacgggctttctccaatgcttcacgcacgcggctcactttcaggtccgactttaatgataagttgatagcggctatctccttcacataaggaacaaacagcgcacggacaacgatctgccggatatccgcacactcttccggttcattccacaagcagtggtaaacaggtaataaatctgtcaggcagacttccttccgaccatgaatgaaagcagaagctttcagcagcttcacgatattcttccagcgacggtcgctcacatagacattccgatgtacttccgagccttgaatctcgactttctccaggttcttacggatttctgtgatgcaggacaggacttcggcagataccttgatctgccgtatctctttctgccatccggcatattcctcatccgaaatctgccaccgacatgcttcctgttcttcttcgtcaccatcgtccagcaacatttgatagaacgcttcctcctgtttcacgcaagtgctgataatgcgaatcaagaaacggtcccacaaggcttccagtccttcgccctgcgtaggcagttcattactggcagccaccagcagcttcaacggaagtttcagttccgtatctccattccgaaacagcttttcattgatgaccgtcagcaacgtattctgaatagccggaccggctttccatatttcatccagaaacacgacatccgctgtaggcagatacccgtccacagcacgctcgtatttatccgattccttcagacggctgatgctcaccggaccaaagatctcatcaggtgtggagaaacgagacatcaggtattcaaatgcccttgcatctacaaaagctctcttcaaccgacgggccaccatcgactttgccaccccaggaggtcccagcaacaaaatactttcgccagccaaagcagccagcaaagacaaaccgatttcagcctctttctcatatacccccctgttcatttcggacagcagcaactgtatacgttcttttatttccatattattctttgattctgcacataaataaagatgttattcaccttaccgcctatgcattgtttgcagataaacggcttgcaaatatacggttttacctgtcattaacataaatacatcttctctaattctgtcttttatactcaagaattatcttaaggcatatttaatattgattatttattcacccaatatgcaataaaaacaaaaggaggtaaatttcctttctcattttcccccatttacataaataaaaactatctttgcgattcagaatcccgaaagacgaaagaaaatggagcaaatagacaacctaaaagagcttatcaatcaaggggatgtggacatagcaatcaagcaactggaccaacttctccaagacgattctgtcgagaaagataaagatatgctctactatttacggggaaatgcctaccgaaaaaaaggagattggaagcaggcgctggataactaccagtatgctatcgatcttaatcccgacagccccgctgttcaagccagaacaatggcgatagatatcctgaatttctaccacaaagatatgtataatcaataaccgaattcaaagataacgtaataaaatagagattatggcaaaaattaaaggagcaatcgtagtcgacacggagcgttgcaaaggatgcaacctatgtgtagtagcgtgtccgctcgatgtaatcgccctcaacaaagaggtgaatatgaaaggctataactatgcctggcaagtaaaagaagatacctgcaacggatgcagctcgtgtgcaatggtttgtcccgacggatgtatctcagtgtataaagtaaaagtagaataaaagaaaaagaatatggcagaagaagttgtattaatgaaaggaaacgaagccatcgcccacgcagctatccgttgcggtgcggacggatacttcggatatcctattactccccaatcggaagtactggaaacgcttgccgaactgaaaccgtgggaaacaaccggcatggtagttctccaggcagaaagtgaagtggcagctatcaatatggtatatggaggcgcaggtagtggaaagatggtattgacctcttcctcaagtcccggcgtgagtctgaaacaggaaggtatctcctacatcgcaggtgccgaacttccttgtctgattgtaaacgtaatgcgcggcggccccggattgggaaccatccagccgagtcaggcggactacttccagacagtgaaaggaggcggtcacggtgactacaggctgattgccctcgctccggcatccgtacaggaaatggcggatttcgtggcactgggattcgagcttgctttcaaataccgtaacccggctatcatccttgccgacggtgtaatcggacagatgatggaaaaagtagttcttcctgcacagaagccacgccgcaccgatgcagaagttatcgaacaatgtccgtgggctgctaccggaaaagcgaaaggtcgtaaaccgaatattattacttcactcgaactgaagccggaagcaatggaaatcaacaacatccgtttccaggctaaatacaaacagattgaggaaaacgaagtacgcttcgaagaaatcaactgcgaagatgcagaatatctgatcatagctttcggttccatggcacgtatcggtcagaaagcaatggaactcgcccgcgaaaaaggaatcaaagtaggtattcttcgccccatcactttgtggccgttcccgagcaaagccattgccgcttacgctgacaaagtgaaaggtatgctcgttacagaattgaatgccggacagatgatcgaagatgtccgcctggctgtcaatggtaaagtaaaagtagaacatttcggacgtctcggcggtattgttcccgatccggatgaaattgtaactgctctggaagaaaaaataatcaaataacgaaacgacgatgaatcccgataaaataagaaacgtattgaacatccttttcatgatattggcacttgccgctatcattgtctactttgtagtaggaaaggaagattttaaaatgtttatctacgtatgcggcgcggcaatctttgtcaagctgatggagttttttatacggttcaccaacagataaggagaagaagttatgactaaagaagaaataatcaaacctgagaatctggtttataaaaaaccgactctgatgaatgataatgccatgcactactgcccgggttgcagtcacggcgtggtacacaagctcgttgccgaagtcattgaggaaatgggcatggaagaaaaaacggtgggagtctctccggtaggatgcgcagttttcgcctacaactatctggatatagactggcaggaagccgctcacggacgtgcacctgcagtagctacggctatcaaacgcttatggcccgaccgtctcgttttcacttatcagggtgacggtgacctggcctgtatcggtaccgccgaaacaatccacgcactgaaccgtggcgaaaacattactattatctttatcaataacgctatctacggtatgaccggcggacaaatggctccgacgactctggtaggcatgaagagttctacttgtccttacggacgtgatgtcgaactacacggctatccattgaagataaccgagattgccgcccaactggaaggaactgcttacgttacccgtcagtcggtacaatcagtgcccgccatccgcaaagccaagaaagcaatacgcaaggcattcgaaaattcgatgaacggcaaaggttccaatctggtagaaatcgtatcaacttgtagctccggctggaagatgactccggaaaaatcaaataaatggatggaagaacatatgttcccattctatccgctgggtgatttaaaagataaagaataacgcaaaagtcaacagaacaatgaaagaagaaataattattgctggattcggcggacaaggcgtattgtccatgggtaagattctggcttattccggactgatggaaggaaaagaagtgagctggatgccggcatacggtcctgaacaacgaggcggaacagccaatgtgacagtgattgtcagcgatgacaaaatctcttcaccgatcctgagtaaatatgatacggcgatcatactgaaccagccttcactggaaaagtttgaaagcagagtaaagccgggcggtatcctgatctatgacggatatgggattatcaaccctcctacccgcaaggatatcaaagtatatcgcatcgacgcaatggatgctgccaacgaaatgaataatgcgaaagccttcaatatgatcgtacttggcggtttactgcaactccgtcctatcgtaactctggaaaacgtcatcaaaggattgaagaaaactcttccggaacgccatcaccacttgattcctatgaacgaggaagcgatcaaaaaaggaatggaattaatccacgaagtttaataaattaagagtttaaaattgagaattgagaattatttgctagataatagcgcgatgcaacataattttcaattctcaattctcaattctcaatttaagtaagtatctttgcctccaattatgagacgaatcttactattatatatattattctccgttgtaggactgagtgctatccatgcacagctcaaccctgcccgccagcaaatcgacgagaacggacgcgaccaatatggtaatcaggtagaccctgccatgattccggacaaactggatagtgccaatgttgaagtacagggactgccgcctacactatatatgtggcgtatcaagaaccaattaggcgaccggacaatgattccggcagatacaacttaccatcactttcagaatacgaatcttacagaaggaatcaccggacattataattatctggccaatttaggttcaccgcgtctgtcgcgtatcttctttgagcgccgttatccggaaccaaccatctttatggagtctttctccagctttttcattcgcccgacggaatttaactttacgaatagtaatgttccttatactaacctgacctatcacaaggccggaaataagcaaaatggagaagaacgtttcaaatcttatttttcagtcaatgtaaacaagaagttggctttcggctttaatattgattatctgtatggccgaggctactataataatcaaaacacttcttattttaatgccgcgcttttcggtagttacattggcgaccgctatcaggtgcagggaatctatagcaacaactatctgaaaacgaatgagaacggtggtatcactgacgaccgctacattaccgcaccggaagaaatggcagaaggaagaaaagaatatgaatctgtcaatatccctaccgtactcaatgccagtgccaaccgtaaccatgacttctatgtctttctgacacaacgctataatctgggattccaccgggatattccacaggcagaaaatgatacgatgcctgccaaacaggaatttgttccggtcaccagctttatacataccattcaggtagaacgttcgcgccataatttccgttcggatgataatgtagaaaactattataagcaaactctccttgataaagagaatacattcgtcagagacagtactgtctatatcggagtcaagaataccataggtattgctttgctcgaaggcttcaacaaatatgcaaaagccggattgacagcctttgcctcacataagctgagcaaatattcattaatgagcctagacccgctaaagcaggataaatacaatgagacagaaatctatatcggtggcgaactgactaaaaaacagggaaactttcttcattatcatgcaatcggtgaagtgggaatggcaggaaaggctatcggacagtttgatgtcaaaggagatatcgacttaaatatccctttatggaaagataccgtcagtgtgattgcacgcggagaaatcagtaataaacttgctccattctacatgcgtcattaccactccaaacatttttggtgggatgatgatatggataaggaattccgcacccgtatcgaaggcgagctgagcatagctaattgggggacccgcttaagagccggtgttgaaaatataaagaactatacttatttcaaccagcaggcattaccggaacaaaaaggtggtagtttgcaagtagtatcagcttgcttcaatcaggatttcaaagtgggaatcttccatctggacaatgaagtgatctggcagaaatccagtgatcaggctgtacttccattgccggaactttcgctgtatcataacttctatatgcagttcaaactggcgaaaaaagtattgagtgtacaattaggtgctgatgtacgttacttcactaaatatgatgctccggcctatatgcctgctacacagcagttctacctgcaaccggaagaaggtaaagtagagataggcggttatccgatagtgaatgtttatgctaacttacacttgaaacgtacccgtttctatgtgatgatgtatcacgtcaatcagggaatgagcaaacctaattacttcctggcacctcattaccccattaacccacgtgtgctgaaattcggactttcatggaacttctatgattaacaaaacctctatggcttatgaaaacgcgcccgaaattgagactattcagatatctgttgccggtagtcattgtattggcacttatcttctctgtccgctattgcggtaaacaagaaaaacctctggggcatccgcgtgattacgcagccatcgccaaagaaggcatcctgcatgtagccaccgaatataattcaatcagtttttatgtagacagtgacactgtctccggattccattatgaactgatagaagcgttcgcacgtgacaaggggctgaaaactgaaatcactcctgtcatgagcttcgacgaacggctgagaggattaagcgacggacgctacgatgtcatagcatacggaatactggcaaccagcgaactgaaagattctctgcttctcacctcccccatcatactcaacaagcaggtgctggtgcaacgaaaagcgaacggggagaatgattcactttatatccgaaaccaattggaccttgcccaaaagacacttcatgtggtaaaaggctcgccttctattctacgtattcagaatctgggaaatgaaatcggagatactatttatataaaggaaatagagaaatacggttcagagcagttgatttcgttagttgctcatggagatatcgattatgccgtctgtgatgaaagcattgcccgtgcagtggtagattcattgcctcaggtagatatcaataccgcaatcagttttactcaattctactcatgggcagtcagcaagcaatcacccgcattgctcgatagtttgaatacatggctggataaattccaaaaagaaaaagagtatcaaaagatttaccggaaatactatggtgataaatagataaaaaataatacgccgaagacttgactttcgcatttgaatgtcgtatctttgtcaacgtaatcataaagtagtttcagttaaactacacgtaaaggagggaatcacagttccctcctttctttttgttacaatgaatgaaaatcagcctttttcccagctttttgctcattttacccccgagcttagtccgttttacctcgtttgttaccatacttaacatagtatcttatgactaattagatgctttgttatgattaatcagatgctttgttatccataaaccgatgctttgttctcccaaaacagaagctctgtttccggacagctcccaagagttaacaatcaataaagttgctcttgacaaaaatttgctctacttttgaaaaaaattcccttttcgatgtcacgtttttaatccgccaccgtcttatcagtgtaaatggaactgaaacaatttaaaataaccgttgtaccccttcgagacaagctgctgaactacgcccgaaggatgacagatgatccttcggatgcggaagatgccgtacaggaagtcatgctgaagctgtggaatctgcgccagaagctagacgagtacagaagtatcgaagccgtagccatgaccatgacgcatcatctctgcatggatatgtggcgtgccaaacgaccggacactctatcactcgaccgtgtacaggctcccaccccttcggctactccggagcgactgctggaagagaaagatgagttcagattgatgcgggaaattatcgactccctgcctacgctgcaacgaacgattattcgcatgaaagacatcgaagagtacgagacggaagagattgccgaaatcaccggctgcaacgcagaagccatccgcagtaatctgtcgagggcccgcaagaaagtaagggaagtctatttgcaaacgatacaagaacgaaaaaggaggaacaaagcatgaaagatatagaaaccttgctaaacaaatatttcgaaggagaaaccacttgcgaagaagaacgcagactacgacgtttctttgccgaagggctcgtaccggaacatctggaggtatatcgcccgatgttcgctttcttcgaagcggaacagaaggaacttgcggaaatctccggtaaaggtaatgccgccgagatgccggaactcgccccattcgagaaaaagacaaaaacggtcagacagtatctgacttacagtctcagtgctgccgctgccgccatcctgctactggtgggcatctccggtatctaccgtcatctatcccctgcaccggccaactatgtgatcattgacggtaaggaatatacggacgttcatttaatccgtgaacaggcgatggtcgcctttcgtgacgtcagcctcagcgaggaggaagtattcgctactttatttgatgaataatataaaaacagcatataattatgatgaataaaatcattcgtaccacactaatcaccctgttacttacattcgccgcccatgcggccgcccaacagggactacagattgccaccgtcttccagaagtacggaaagcaaaaaggggtaactatggtagagctatccaatgaaatgctggaaacttaccagatgactctttataaaagtcttgttttcaaggatgccagcgatgcactacctacgattctccgttgcctggaagccgacaagaagaaagcaaagaaggtgaaagaagtggtttccaacgggcaaatcaagtccggctattaccaacttccccagcttaaggaagatgtgaaccgctttatcctcttcaaaaccggaaagaaagattcggctacccttatctatattgaaggagaactggatgccgacgacctgatcaccatgttattcatgaagaaagaataaaaaaacagataaagaaatacgaatatgaaaaaactattattactatggctcatgatagctccaatgagcggcatggcacaaaatgaaagtacaccgcaggatacaacactttacgtcaacggacggaagatcgtaatcaaggaacaaggcgacaagattaaagtgaaactctacgaaagcgcatccggcggagatacgataacaaacgcgcaaatcttcgaaggagtctacctgaacgggcagagtacggaaagccgtaccgtgctgagcgctctccccttctcgaagaaaaacaacaagagaaacaggttcgagccacatgccggcggattctacatcggctacacccgactgtccaatgacttcctctcattcaatccgtcgaacggtgccgacctcaacaccagtcattcatgggagataggcggcaatctgtttaccggttcgcacgcctttgcacctacctataactgggggatcaccatcggactgggatggggataccgcagtatgcgcctggacggcaatgatgcttttcgtgaaatagacggagtgactgaaatttattccggcatggaggcggaagagcctacagagtacagcaaaagccgtctgcgctatttctacttccgcattccgctctccatcgaatggcaaacacggctcaacggcaaaggtcctttgttctttgctgtaggtcccgaagccgaaatacgtcacggattcagatccaaagccaaagtcaacggatcaaagaagacgattgacaaggggctgaacggacgcccgctaggtatcaacctacttgcacaagccggttatgcggatttaggcgtgtatatgcgttactccacctacggcctctttgagaagaacaaaggtcccgaactttatccgttctctttcggtgtatgctggtactggtaaagtaaaaactcagccccttgcctatttctgacagttaacaatcaataaagttgttcttaataaaaaatagctttatctttgggagttgttaaaacaagcacaataggtatattatgagtgaaaagatgattaaatggggcttcatcggctgcggagaagtaaccaaaaccaaaagtggccccgcctttcaaaaggtagaacattctgaagtagtagctgtaatgagccgcgacggcgccaaagcaaaggcttatgcaaaagaaagaggaatcaggaaatggtatgatgacgctcaggaactgatagacgatccggaagtaaacgccatttatatcgccactcctccttcttcacacgctacctacgccattatggctatgaaagcaggcaagcctgcctatattgaaaaaccaatggctgtcacttatgaggagtgtacacgtatcaaccgtatttctaaggaaacgggtgttccctgtttcgtcgcatattaccgccgctatctcccctactttcagaaagtgaaagaaatggtagagaacggttctatcggtaatgtcatcaacgtacaagtccgctttgcacagccgccacgtgatttggattacaaccgtgaaaatcttccttggcgtgtacaggctgatattgccggtggcggttacttctatgacctcgccccgcatcagatcgacttgctgcaagatatgttcggctgcatcctcgaagccagcggatataagagtaaccgcggagggctttatcctgccgaagatacgctgagcgcctgcttccagttcgacaacggattggtcggcagtggttcatggtgctttgttgcccatgattccgcccgcgaagaccgcatcgaaattatcggagataaaggtatgatctgcttctctgtctttacgtacgagccgattggtctgcacaccgaacgcggccgggaggaaatctgtatcggtaatcctgagcatgttcaacaacctcttattcaggcagtagtagatcatctgctcggtaagtcagtctgctcatgcgacggagaaagtgctaccttgactaactgggtaatggacaaaatattagggaagctctaagataaagctccctcgtttgtttcttaaaataatttaatcactatattctatcgttagttttctttatatttgcgaaaggtagcaataaaagcaaaactaacgatatttattttttataactatgaccaaagaagaactaatgaggaaagcaatagagctttcgaaggaaaatgttgctaatggtggaggcccgttcggagctgtcattgcaacaaaagaaggagaaattatagctacaggagtcaacagagtaacctcttcatgtgatcccactgctcatgccgaagttagcgccatacgtgccgcagccgcgaaactgggaacattcaacctcagcggatacgaaatctatacttcatgcgaaccttgcccgatgtgtctgggtgccatctattgggcacgactggacaaaatatattatgggaacaacaagacagatgccaaaaacatcggtttcgacgattcctttatttatgatgagctggctctaaaacctgccgacagaaaacttccctcggaagtattattgcacaacgaagccattacagccttcgaagcctggatgtccaaagaagacaaagtagaatattagcatctaatctcacttaaactcactaatacttagtaaaatgaaaagaaaaaactttttgattcttctagccgcaggatgtttgttcagttgtcagcaacaggatgaactgcaagaaacaagtaaagaagcaaccaacttctctatctctatcgacgacgctctctctgacccgctcacccgtaccagcaatgatctgttccctgccagaaatagcatcactacaggagaagttatctccatggctgcctccggtcaggactatactccgtttattgttggcaaagacagccgcgcatggaacgaaataggaactgccacaggcacagtaaccttctacgcccactatcctgcattgacagacgaagccgctaccagatcaggcggtaacaaacgctatttaaaaggaggtcaggagcacttgttcggaacagcggaagcagctccgggcagccagaatgtatcgctgaaattcaaacgaatgaccgtgccggttattatacttgatgagaacgatcgtccgtatgaaggcgaagctaaagttgagctcagcctgaaaaacgaaggtacgcaggatttattgaacggtaccatagaaatcaacgaaaatgcgctgtcagagaatatcgaagtaaagaaagtatccgaaggcgttactaccaatgttctcccgcaaaagatcaatgctggagaggaaataggaacgatcactgtcggaggagtcactcagaagatcagtgcagtggaagatcttgatttaaaagccggaagcacactttctgtcagattatcaaaaaaattcggaggcggtattattgatggtaatgttccattgtacagataagaagattgcacttaaagacaatcttgcagattatataaataaaagaacgggattcgtatgaatcccgttcttttatttagacctaaaaactatataataagccggtcagtccccaagagccgaccgacttatttataacactttattacttatcccaccatacgcgtgatgtcatcttatcgcctccgctaagtctcttaacggcatcattgtaattaacaggattagctgttatttcacttgtcggataaatgaaacgacgaggaatctctccatttgtcacattgttaggatagctggctgcatttcgagccggggttaattttggatatccagtacgacgccaatttgcaaaagcttcatactcattacagaacgtatggatataatattccgtattaatctgttccagcgctttttccgtatcagcatccaatggattagcattcagataggcagttatcgcatcatctgtaatcgtagctgaggctttttcataataggagaattgtttcatggcagcagttactccatctctataaaatttttctgcatctcctgtatagagtccacgtttcactgcatcagccaataataacaagttaccggcatgagtgacaagcatagagggtgaatccgggcgtgcataaactgtacggttaggaacagaatatgcttttctccaatcaacctgatagcttggagctttactcaaatcccagtctcctcctgacacatcataaccaaccggcatacctttctgcttagcagccgtgttgtcacctaaatcaaaatcagcatctccccatcccggtttaggatctctggtacaaactgtagcaatcagaggaagacgaggatcgtcctgaaggatgtttataaatgtttcgctgatatagaacgcctgagtatccagactggaaaatacttttccgtaaggttcggcagagtcatcgcttggtgaaccattggtatgtctgacgatcgcattatcatcgttgcttacgaacaagccattcgaaaccgctttagctacccatgttttcgctttatcaggagctactttggtcaggcgcatggctacccggagcatcagtgagtttgcaaatttcttccatttcgcagcatcaccgttatagataacgtcggcagcccctatcgtattaccggcagaagtgcttaatgcagcttgtgcttcatcgagttctttcagcaggtcattatagattgcttcttgtgtatcatatttaggatacggaatcggattggtagaatacccctgccctgcttcagaataaggaacgtctccataaaggtcagtcatattctggaacatatatgctttcagaatgcggcacatctgatattcattcgcataagcgggatttccttcccaattattcatcacatctataatattgcgaatagctgcacgcccaccggaatagaatcctccccaataagcaccactatactgatcgttccatgtatagaaaactccatacgcccaatctacactagccgtatgctgtatcatgttggctgtgtagatacagccattacgccacacgtcccagtcggagccacatatctgtgcttcaacctgagtaaattccattttataatccaccactccgggattcaggttcatagggtcgttattcacatccccaaagtcattacagcttgtcgctaatcccatcagaccgaaagccgtcaatatatataaagtaaactttttcattgttacagtatttaagatgttagaacttaacatttacattgaatcccacatttctcgtggcaggatatccgttcaattccagaccttgagcattaccgttattataagcagattccggatcaatattatccgtatgcttcaatatagtccaaaggttacgaccgactaaggaaagggttaccccttttataagtgtctgcttattcaaccatgcctgcggcaaagtatatccgactgacaattcgcgcagttttataaaactcgcattataaacaaactcttcagcaatattctgactggtgatagcctgccagtagtcttgtgcagaaacggctacggtattcttcacatagccaccattgccatcagacattacaccattgcccaccattgttcctttaccgtcagcaccacgtccctgcaaagtattcttgtgcagaccgttgctgtaaagagacagattggttccggagaacatcttagctcctgccttgaagtcaatcaggaaagaaagagttatgtttttgtaagtaaattcattgcgccatccgccggttaccttataaacgccgtttcctaatacctgaacctcgtctgagtgtacaggaagaccgttttcaaaaataacttgtccatccgaagtacgtttgtattcataacctactaattcaccataaggatgccccaagatattctgaacagaaacactacctacacgtgaattggctccgtcaagagtaagtctctttatcttttctcccgttccgtctattcccaggtatttcacatcactgctgttataagcgatattgaatgtagaattccagttaaagtcctttgtatgaacaggaacggcattcaccattacttccacaccattatttcttatttctccgacattctggatagctgattcaaaaccggacgcaccactggtggttatctgcacgatatcatctttggttgtttttacataatatgcagcatccaatgacaggcgattatccaagaaagagagattcaaaccaatttcccattcggaaatctgaaccggtttcagtcctttgttaggtacggtcgagttattgatcgttactacaggctgtccgttcgattggtaattatctactttataggtaagaagattctgatatgctttggttccgttagatgcagctgcataagatgcacgcacctttccgaaagtaaaccagtcgggagtcttgaatgtatcactaaatacccatgacataccgatagaaggatagaaataatgattattatctgggtccagtgtagagaaccagtcattacgtccggttaagtttaagaatacctgattcttataaccaaggtctgcagtaccatagattgaatttacccggtattctgtatattctttcttatacacatgcttcgcagtattgctgcttgaataaaaatcgggcacaaagaatgaagaggccttatcatccagaccgtatttctttgtaatatttctctgacggtttccaccgaaagtagcaccgacactccagtctccgaatgtcttattgaatccgatcaaatagttcaggttcatttcagagaagttctgagtgtattcctttatataaccgcgtggatcttccggagaagcggaaccgattggcttcacttcagaatattccagattataaccgtcacgtgtcacagccccctgaatgtataaccagtcaaagatatcatacttcaaagtcataccaccagtcagacgattacggttggtttcattggtaaccctgtactgcaaccaatacggattattgaaataaccgttcgtaccgcctagcaactctttgccgtcagcaccggtaccccagtcacaatccggattttcacgttccatccaacggatatcaaatgaattggcatgataaagaagtgcggcattcgtgttactgttaccatcggacaagttagaacgacctttattcttgtcgaatacgtagttggcattcaccattaaatgaacttttgaagaaatgtcataagtcgtattcatattgataccttgctggctgatgctggaattgggaagtatcccctttaccgccatattggaaacaccaaaacgataggatatcttatcggaagcaccgcttactgccaaggttgtcgtattgttaattcccgtacgatagaagttcttccagttatctaccggagaataagcgtattcgttacccaagaagtttactgctttttttccatccattacttcaccccagctggatgtttccgttgcttttgccacatctgcagaaagcggacggttaccctgagttccttgcccgtagacattctggaaatctcggtaatcataaatcacatcaaaagccaggttattgttgaattcaacggagaccggttttcctttctgaccggatttagtagtaatcaagatagcaccgttaccaccacgatatccataaagagcggatgcagcagcacccttcaacacctgaatatctgcaatatcatccggattgatacttgacaaaccatcgcccatatctttacctccccattgacctgcactaccgatattagtattatcaaacggaacaccgtcgataacataaagcggctggttgtttcccgtcaaagaagcattaccacgaattacgacacggctactaccacccgggccagttgcatttccggaaacggaaacaccggcaatcttgccggaaagtgcgttaccaatgttcgttgtacgagcttcagtgaaatcttttcctcctactgtcgttgtagaatagccgagggaccttttctgacgcttaatacccaaagctgtcacaacaacttcatcgagtgtctgcgtatcttcctgcaaggtaatgtctaaaggtttacccgtgaacttcacttcctgtggggtataacctacataagagatttgaatcgttgctccgtcaggaacattggaaagaacaaaattaccgtccaagtcggtaattacaccatttgtagtacctttgactacaactgaagctccaataaccgcttcacctgccttgtcttttactacacctttacacgtaccgttttgctgtgtgacactcacacttgttgctccattctcagaggctgcataggaaattgctgccggcatggcacacaagagcaacagcacacttactgatttgagtggtttaaacataatactgctcttttaaggttaataaaaattgtctgtgtgtagagaggacgtcaatatttcatagtttggttctgactacgattacaaaaatatgaatttattttaaataacaagaaaataagtagttttttttctttaaacaaaaagaataattatatcggctaacaaaattacaatatccaaaacagaatgaaccttctttggcattaaatgaaaagataataaagaaatccctggaactgctgtagacactcagcattccagggattatagattatacccttattcaaactcagacatctctatcaatgggcaaaatttcttcaatatatatattagtcattcatctcatctagggggaatgattggtaatacgtagcaacatgtgtctggcccagatgaataagtggcaaatgatagttttattgtagactcatctctcccccctgtaccaggtctacgtgatgaacgactatttctagcactattattgactgaactgccagaagaacgactacttcccgaatctctatcgcttcctgaatcccttcttgaactatttccagaaccattatttttattataattagcttcattcaagtctataaaaaaatgatatggcctaagcaccttctcataataacgtgagaagctataaagtggaatactattagaaggtttactatcaagtgcataaacataacaagctatccgtctatatttataatattcattaccctgccctaattcattccaatcagttgtataataagatttaaccttatctgaggttggttttattttatataggtattcatataatggaatcgtaccggttggatgttcagatgcagaatatacatagcataatattttgtcataagtatatataccattgccttgtccatattctctataatcagttgtgtaataatagtcttttacgggccaaaatatatctctagtagttccgcctcgatcattgaccgtatgaatttctccttcataaatatacctatataagggtataggatccccgacatcgatataacttttgtctcttatatatttcattacagcagcttttaactgttcttttttagcaaaatcctctactaactcataaataggaataacagtttgggactctgcatctattagttgcatattggtagtatcacaacttgattgccacaccgaaatatctatagatattggagtctgtgtgtctgcatttatactcccaacaaaaggtttattaggattacctcctattgccctataaaccagttcttgctccgtattatctttcaacaatgtttcatcaatatgaccatccacatttatcccaaaaatccctttaacatgataagagcagcctgactcaactgtcctttttttcatagaagatgcaaccaaactacgatacataatatctagacgagcacctaatgttatattcgtcaaaacatgtgttccataattatttataatatactccatatcttgagtttctaaatcttttttaaatttattcgtaaggtattttgacaatataatattaggagcagtcatatataattgtttcattctcataaataaagaatagccagctatagaatatttagcagaatagtgttctgcgctactaaagcttgattccaaatgccccttaaaagctgagatagaatctgaatcagagtagagttttaaatgtacactcaaattttttgtatattcacccgcagaaactccagctgtcaatctgccatcagtactagctattaaatcataatcaaccctatcattataatctttctttaaagctactggatcaataacttgagctttagccgatgtgttagtaaaatacttccctgttatatcgtaaccaaacccaagcaaatcatactttctatctccaccacttcgagttaaaacatccatttgagaatcctgagtataaacatgctgttctattatagcatctgaacatgctatacatactaacaaaaataagaaataatatagtcgtttcataagaataaattttagagtttttctattacaaaacaaaatcaccgacaagcacttcatccgataaaacaaattctatttcatattctcctttatcataacttgataaatcaatgcataaaggatacctatcgaaagaaaccatctcatcatagattatacttccattactcttattagaaatatagacacatacatcttgcatactattttcacaaacaatatttaaatattgctcatcaatagttatttctataggcaaggctacagaccgtgggcgttttttagtttttgagctttgagtactatgtagacgaatatatctactagattcaacttcgcacagaattggctgaataataaagcccaacaggcataacattacaattatttttttaagcatagcataatttttagttagtaataaaaataatgctcaaaattaaagtaattaataagagagagagaaaaaagctgtcgacatccataaaaccatattacattaattatcaaacaattacataacattacattcaaaatatatcgacattataatcaaagaaagaaaaaacatagaactattttgtcgaaaaagagtttaaaatttcgggagtgtaatttaaactctgtctggtttctatttctttgtaagcccccgataaagtacccgtataaaaaagaatcgctatagcaaatcgaacaaagctatagtgattctgtatttatattcttgtttttcgttagagtattattagagttctttggagtttcccgattcccagcaatggggtagcagctcttttaggtctttctccttgttggctgcataatacggcaatagtgcaatcacctccgtgagccattcccgggggttaatgttggaggctttgcatgatgccaagagcgaacagattatggcagtgttctgcgcggcttcatggtttccacaaaataagaagttttttcttgataaggctatcggacgaatcgcattttcggccagattattatctattttaagcctgccgtctttcagataattcctcatacgtggccaaagttgatacgcgtaagcgatagcttgccccatccggcttttaggaagcactttcggataggctgtttccatccatttttccagttgctcaagtatgggaagtgcctgttcctgtcttctaagcatgcgttgctcataagtgagttcctcctggtcggcaatctgttcgatccgatagagttgctgtatttgagccagaacatatccggccagggattcattctcttctttggcaacctcgtaatgtcgccttatgtgggcaaggcatccgacaaggcacacctctttcttaccctcaaagatgttgtaggccgcatagccgtcactttgaagatatcctttgaaggtttgtaataatttccaggctgtttcctgtgagcgggaaccgtcatcataatgaaagaagaccaatccatccataaccgccctgactatccacaagtattccttaaccgctttatgattctgtttgttgataaccggtaatgtcgtttcgtccacctggatatagtcggccttcaatacctgtttcttcaactcttcatagagaggtttaagtaattcacaggcaggtttgaaccacccctgaagcgtgttttccgagatcttcaggcctaaatggtgaaactcacgcacctgacgatagaatggtacatgatattcatatttttgcaagaggatttcagtgagcaggctggcaccgggaagtcccttgtagataggcaatagcggaagaggggctataataacactgccctgatgcccctgaggcaaacttatattgtctttcaggccatacttgggacgtatgatctcttttacgtataatttgcccggttcaaattcaagtgtacgtgtgcgttcctcgcctatgcgcttgtatttatccggatcgactccttcgggttctatgacaatctccactacaggaaggccatccaacatgttgcggttctgacgcactttctttttgggagtcgtcgagcagacaggttcttgggctgcggcttcttccggtatttcgtgttccaacggctgaacaggtggatcgaacagtgatagctggttcggatccagatgggctaatttctcgctcttacggccgaataactgacgatttaaccaggctacctgagccagcagttcctgaagcttattttgcagctgttcgttctgccgggtcagacgctcgattgactcagactgggagctattagcctgctggagtgtggccaccaaaagttctaatgtttctgtctgagtcattcgtcatacctgttttgaacaatacaaaaatacagaaaagcaaccgtataatcaaggtttcacctgctgtttttcagtactgcatgtcactttttcgtaacgctttcagacgtttgagccttttggaaggttcgtcgttgattccctctaccatcagaaccaggtcacgccactgcatagggtacgacttgctttctttgtcataagagggaaggcggaaagtgccttcttcaagtcgttttatgtacaaaaccagtccgccatcttccgcgtgtagcagtttcattgtagtgcgctggcggttgataaagataaacacatcacctaaacggacatcatatcccattttatcatgaacaaccccgcataatgagttcatacctttacgcatatctgtcttacccggacagagaaagtagcgcatcgtgtcattcaggcaaaacatggcgattgcagagttgagtgagcaattgcatggccgcctgggattcagccataccactgaagtgggcgataataccaccggggaactctatccggatctcacccgtttgtatagcgccactatcacaggcagagtgggaagcaggtgaagaggtgaggctaaccggtgcaaactcctctaaagaggaagaatgcctatccatatgataacgcctcgataggccaaactttcctttccaatagtaaaagcttgattcggtataggcttcatttatacagaagtcttttatcgtcaaaccgctacgctgttgacgagacaggatttcaatgaattcttctttactcattttttgcatagtcttttttctggcaaagatcgagacttaaagatacaaagacaacgggtactttatcgggggcttacatttcttttaaatcacaacaaatataattttttctttttggatttacaaatgcttcttaaggtagtttttggatgtgtgcaagggcggcgaagaatgagccgtttatatacccttgctcacatccgggaactaccttttctttgcgtttgaaaagcaaaaaaggggaaatgggttatatcgccagaggcattctctctccaaacttgattcgtagttgcccggcagttaacgcccaattctggagcggttgcgtccatttcttggagatgttcatcacagccaggtagatcaacttcatcaatgccatgtcattgggaaagacacccttggttttggtcacctttcgtacttgacggtggaagccctcgacggcgttagttgtgtaaatcagtcttcggatatgctcatcataagcaaaataggccgatagattatcccagtttcgtcgccatgattccaagacaacagggtattttttaccccatttatcttgtagtttatcaaggttgagctctgctaaatctttattaggggcttgatagactgttttcaaatctgccataaactctttttgatcttttgaggctatgtatttcaatgaattgcgaatctgatgtatgacgcagttctggatgattacctcaggaaaaatagtgctgattgcttcagcaaatcccgtgagattgtcaatgcaagcgatcagaacatctttcatgccacgtgctttcaggtcggtcaagacactcagccagaaattagccccttcgctttctgatacatacatgcctatcagttctttatggccatctttattgactgccagaacattatagacagctcgactttcggtacgaccaccatccttcaccttgtagtgcattgcgtcaagccacacaatggtatacattgattccagggggcggctttgccactccttcaccttgggaactatgcgttcaataatctcacttagggtgttgtgggagatctcaacatcatacatctcctcgatatgggaggaaatatccctaaggctcaaacccataccatacagactgataatcttggaagacatgttgtccgcaagaatcgtctcgcgctttttaaggatctcaggactaaagctgctgtgacgatcttgaggagtcacgatatcaatctcgccggccatggttttgacacgtttgctgccacgaccattccgcttattgcctttaagacgctctgaatcatcaaggtgggaggacatctcgccatctaaagcggcctctaaaaactcttttagcaacggaccaaaggctccgtctttgcccgtgagcgattcgccactacgcagttgagataacgctttgtcacgcatctgctgatactcttcactgtttctatccataatacaaagataattgtttggggacagagttcagattacgccctcaaaatttcatttaaacttctcgaatcattcaaatgcattctatcctttttaatgcgctcttttttcttataaatagatttacggtctaaacaataaattgcaaccaaatcatttattgttagattcattttcaataagcaacaaaaacgaatatccaaatctgttaattcaggatacgtctctttcaatttcagcgtaaaattatcaaaagcaacatttacattgttaactatattatcccaatcttcattagagaatttaatatgccccgctttcccagtagtcaatgaaattcctgagacggttattaatcttttgaaaaactcttcacgtaataaaatctccttttgttgcattacaagtaatttctgctcggtttccaattgcgttaatactatatcttgtacttccttttgtttttgcattattaatttctgttgcaaccgaatcctaaattctttttttatacgatatttataatatgaatatactataaatagaattattataaaaaataaaagacatatcctatatatatttttttccatctgtaatttcgaaagctttaaagaatcattctcatttactaacttctcattttgatatatttcctgcattttagttattgtattcgtatacgtttcttgttctatagaatccctatagacatcatatatcctcctatatctcaaagcctgtttacaatttcccaccatctcagcaacatcagcaagtccttcataactggcagctttagtatatagattatcactatttatgcttttaccataatatattcctgcagaatcaaattgacacatatgcacaaaaatctgtgcttttaatatataacaatagcacaattcgtctttttcaggctgaatattccctgatttattagcgtatttcaaagctaaatcatatttctccaatctatcataagtagttccaacgcaattatatatataggctaaagaaatgctgtcatctaaatgtatccaagatgctgctttttcataataacataaagcactgtctttcttctccatttctaaaaaggtagtacctatcgcctgtaaggcatatgcaatattcatactgtctcccaataaagtagaataataatatgcttttttatgcattaacaattcatcctcaaaaagttcctgttctgaatataaattacctagatagtaatgagataaaaataataacttataattctcatcagagtcaactaataaatctataacatttaagtaatactctattgctttcaagacatttttcatttcttcattagccctacccgcgtaaaaatatgattgcgttaataattttcgatccatattgtctttaaaatagtttaatgatgtttttataagtgaatccgataataaaggacgataagttttttctatagattgtgtcaacaacaaacaatataaagcataatctctttgagacattttttgaggagtagttatactttccaatatagagtatgaactatctggattttcctctaatagcttcatagcaaacaataagttatcatcatatttaacggttttatcacatgacataaaaacacacatgacaatagttatcaatataaaacctaataaaatcttcattgtgaataatcaagtgtttttttcttccaaagatacaattttataaacaagctatcataataataaaccgttaattacaataacattgagatttagataaaaaacaaaaaagaaatccctggaaccgctgtagacactcagcattccagggactctaacacacaaaagttattattgaaattgaaaacagtttctaattaaaagcgtaaacctaaagtcatcatcactttactacggctattcgtcacatcagtcttttttaaagctccatcatcaaatggatagaaatcttccttataagtactatacatataagctaagtctgcgtaaaaagtcgatcctctataaccgatacctaatgtataattattatttgcttttgcattcgcaaaatccgtatccgtattaattgaattgtagctcaaatccttaaaagctgtttttttgaatgctgctgacatataattatagcctaaacgaaaagcaaattgaggaataactttccactcagcaccgatacggaaagtattcacacctttcaacatttcttttgctgtaggattctgccatcccattgcttctccatccgaataactaaaatgcatagcggagtaatcctgatattcatattctgctccaatagcgaaagatgatccataagtatacccaagacttaggttatatttccatggtgtacggaaacggaagtcatatccataatcaacaccattcgtaaaatcataagaatctacaacagcctcacttaattttttagagtcaaaatcaggggtatatgtcactgctctaacattcgttttaattttcaaattataaaatgtaggagtatgaacagaaacaccaatacggaatggagagtcttcaaatggacgcacgatagctccaaacttaaaatccacacctgaaccatctattttattctcagtagtcatttcataacttggagtaccataattcacattttctacaatatattccccatactcctctccataagtagaagtctttgaataattaacatcgtatgcaccaatggtcaatcctaaataaacacgatcactgatattaaaagcaacattaaaatcatactgattgatccctcctttttcatgtccatcataccatgaatatggctgaggcaaataacctatataaccatccttatttttatttagattatataaatacccgttccaaccagtagcagcaagccaaccagtctgactatcagtaaacagattaatcttatcatcagctaacttactgataaagtcaccgttcgcttcaatcatagtgttcgcttgattcgtcatttgattagtctgagaaagaattgttcctccaggacccaaatttatcaaaccttccattgtcatatacttatcaaatgacttggaacgagtgtaactgaatccaaaattcacataacgcaaagcggtctgatttccaattttagaagaaaacacaaatcctatattatcaaatgatccacgagtcttatcaacattaaactttgatccttcatatttactctccgaaccaaaagaagaaaagccgaaagttcccattatatcattactacgatatataccaataccagccggatttgtccccatagtagaaatatctcctcctaatgcgcccattgctcctcccattcctacaaaacgggcagttccattcaaatccttctgcgtaaacttagcaccatcgtatattgtctgggcgcctgcacttgccaccataataagagcaagtgcagctatatttattttctttttcatacgtttccttaaatattattatatgctatagttttatctcctgctaccacctctagctgaacctccgccaccggaagaacttccacgactactgctactgcttccgccgccatatgaagaaccactagaacgagaagaactgctgctaggagaataagaactggaactactagaacgactactgctactaggagtatatgttcgagaactactactagagcggttactgctgctaggagtatatgttcgagagctactagagcgactaggtgtataactactacttcctcttgaataagttccgctacttctagaagaagatcccctattataagtaccttcacttcttgaagaagaggtacgagtgctactactacgattgattcctgaagatgtactagtacgagtactactcgggcgagtataagtatctctacgagaagagctagttcttgtacttacccctgtccgtgtactattttctctggttcctactacacgtcctgaagttgttctattcgaagatgtacgaacagatgaaggacgagaagactgatatcggttagaagtatatctagtaccactagttgtacggttaacactcctgttaggagagcgacgattggtgtatagcatgtctctatgaccgcctccaccgccccagccccagctaggaccaccaccccagtggtgatgatgtccccaatagccaccgccgccatagaagccaccccagtagccaccataccagccgccccatgaacccgggtaatatccccagccatagtaaggacgattccatccccagccatagttccatccccaaccgtaggagttgtaacgccaatcccaccaaagcggattactaaatgtcgggaaagcataagcgtacatgccatcggtatatacattccagttccatgaattaggtccgtaaactacgtcccaatagagtgggctgctaatgctgatagcaaaacgtggattacggaaacggataatacgttcggcatattcatagtcctcttgcgaaccatcaaattcaccggttacccattctccttccaagtctggctgagctttctcttttatatataaggtatcgttttccattacgaattcattctcacgagcgtcataacggcggttatattcatccacatcccgtgtttttcccttgcggtcctgaactacaacggtagtgcccggtgatgtatagatgttggtcgtgacttgtcttttcggttccttcttttccggagtcgtttctttcttctcctttttgtctttagaaggtacgaaataaaggtcgtcatcaacgctttgtgccatcaagcctatagggaggcataaagcaattagcaagaaataaacaatctttttcatatcatctcggtttatgtaattacttaaacttattcacattacaaagataaggaagagattcgccactctagggagattttccccaaaggataatagggaaatccctatttctgactatctttgcaaaagattcaccaaaataaaaacaactatgaagtattttgagttcacattccatacaagtccatgcacagaaacagtaaatgacgtactggctgccgtattaggtgaagccggatttgaaagttttgttgaaagcgaaggcggactgactgcatacatacaacaggcattatgcgatgaaaatacaataaaagatgcaatagccgacttcccactgcctgatacggaaatctcctatacgtacgttgaagcggaagacaaaaactggaacgaagaatgggaaaagaatttctttcagccgattgtgatcgacaaccgatgtgttatccatagtaccttccataaagatgtaccccaagcaacttatgatatcgttatcaatccgcaaatggctttcggcacgggacatcatgaaacgacaagcctcattatcggagagttattggacaatgagttgaaagacaaatcacttctggatatgggctgtggtacttcaatcttagcaattcttgcccgtatgcggggagctcgtccatgtaccgctatcgacattgacgaatggtgtgtacgaaactccattgagaacattgaattaaaccgtgtagacgacattgccgtttcacaaggagacgcctcatcgcttattggcaaaggcccctttgatatcatcatcgctaatataaaccggaatatcttattgaacgacatgaagcaatatgtcgcctgtatgcacccgggatcggaactttatatgagtggattttatgtggacgacattcctttcatccgccgggaagcagaaaagaacggactgaccttcgtacatcataaggagaaaaaccgctgggcagcagtgaagttcacatattaagcattaatcttccttatctgtttcaagaagacacagaccacgtatctttaaaagacagcatatatttgtagtagagataagatgtacgagatgctcatctcgtgctgtacggcatgctcatcttgttatacaccagatgctcatccggtagtgtacgagatgagcatctggtacataccatcctttaatgaaaagaatggtatggtataatattccttctgttatgttaccgggaaacagatataaagtattaaggttttgaatcaaactcattctttacctgttcacaccattccctgattctcttttccgcttgctcggattgattatccaaatcgacgaccaaaccgcaccaccgatcaccacgcaacgctctggaacgttcgaaagtgtatccttcggaagaagtaaaaccgaccagcgtagccccgtctccttcaaatacctcggcaagcaacccgattccgtcagcaaagttttcgggataacgtatctgatctcctaacccgaagatagctacttttttccctttcaaatccaacgtacgaagttccggtaacaactcatcccaataagtcggaagttctccgtcgaaccaagtcgaagcacctactataaaacaatcgtaagctgcaaaatcattttgccatgcctgttcaataggcactatatctatcttatccttaccaaattctttctgaatcttttccgccacccaagtagtcctgtcagctttggtggcataaaacaaaccaatcttcttcatatactatacctccattttattccattaatattccaatagctttttagctgcctcatagatcttcgcctcatccggcaatatctctttttccagaatcggattgaaaccgacaggagtaaatgtagatccgacacgctgcaccggaccatccagataacggaacatatccgttccgatcatagccgcaagttccgcaccgaaaccggagaacaccttgtcttcgtgaacaaccaatgctttgctagtctttttcaccgattcgaaaatcgcctccttatctaatggtatcaatgaacgaatatcgatcacttcgactttccagccactttctttttccagttgctctgctacatgcaggcagaaatgggtagtattaccataagtaataatgctcaaatccgttccttcacgacgaatacgtgcctttccgaaaggaacctcaaaatcttccggaacaacagctgctgcttctaccgaattatatagagctttcggttccaaaaacaaggtaaatccctttgaacgcatactggttcgtaacaatccggctgcatcatctgcaaaagaagggcagacaatacgtgcacccggcaacgttgtcagagcaccctctatattttgagaatgatataatccaccaccgatatatcctccggaagcaagccgtaaagtgatattcggagcaaacttaccgttactgcgccaatattcatgagtacactccacatactgttctacggcaggccagaagtagtctgcaaactcagctccttctatcactacatggattttagggtcaaatcggctcataccattggctgtacctacaatataatcttcggcaatcggtgcgctgaatacacgcgcctcgccaaattcctgctgcatgcctttggtcacattaaagaccccgcctttttctctgttagccacatcttgtccccagataaaggtatccggattatggcggaattccgctttcaatgtttcattaattgcattgaccaggaaagtcttctctccttcttcctgatgagtaccttctttgtatttttgcggctgataaggttcgggcatcacaaaatcgtaaatgcttttaggatcaggttcaggggcagccagcgccttgcggttggcagcagatagttccttctttgattcagcttcaatttgcagcagttcctcttccgtcaagcgcttatagcgcaataacatccgccggaacttcattagcggatcagcttctttcacatattccagttcgttttcgtcccgataaagtgtatgtttatccgaattggaatgagaaccgatacgaacgcagttagcctgtacaatcacaggattacgggtactgatcgcatattcgcgtgcctcagtcatggcattcatggaatcgaacacatcttttccattgcagtagataatcttcagattcttgaaaccggagaagttctcagctactttacgattggcagtctgctcggatttaggaacagagatgccatatccgttatcctgtataacgaaaatcaccggaagacgttccagactagctccattgatagcctcgtaaacaaagccttcggaagtagcagattctccgtgcgaagtgattgctactcctttatgcccataatataccattgctcttgctacacctgccgcatgaaggtcatgcgttccggtagcagaagatatattttcaatatgccattccggtttggcgaagtgattcgacatatgacgtccgccgctaccgggatcggttgctttcgaaatgccgttcaatataatctcttctgcagtcattcctgcagaaagcacggtcagcatatctctgtaataagggaacaggaaatcttctcccaatgtgaaaacctgaccgacagccagttggataccatcatgccccgcataaggagcatggtatgaccaacccaaagattgcagctggtaagacggcgccttctcgtccaaagcacgccctaatgtcatcagatggtaccactttttcagtgtttcaacatccgtagtctttatatcatatttctttttcatagttaatgaagttcttaatgaatgaaacaatctgttatcagcccttccagttttccaggtaatcggctatgaagtgcaggaagttgcctcccagcataccgtcaactacacgatggtcataagacagggacagatacatcttatgacggatagcaatcgtatcaccttccggtgtctctattacggcaggcttcttctcaatatatcccactcccaaaatggcaacctggggctgattgattaccggcgtaccgaacaaactcttgaatgtaccgaaattagtaatggtaaacgtacctccgtcaatatcatccggcatcaatttgttatcacgagccttcaatgccagcgagtctatagctacagccaatccattcaagttcagatgatcggcatcgtgtaccacaggaactatcagattgccatcattcaaagaaacagcaataccgatattgatatgtttcttgaaaagaatattatatccgtcaacagatacattgacctgaggatatgctgccaatgcttttgctacagcttctgttatgacaggcatataggtcagtttcactccctcacgacggaagaaagcgtctttattcttttcacgccagcgtaccagtttggttacatctacctctactacattggttacgtgtggtgaaaccttcttggacatcaccatatgatccgcaataatccggcggacacgatccatttctttcacttctactcccggaatattggcagccgcaggtgcttgtttagatggagcagacggtgcagcaacaggagtttgcacggaagccgccacaggagaagttgtcatagagccagcccctccagtcgaagaaggcatagaagccgtaggtgcatcaccggtaggtattgccgccttcgatacttcagaaattccccttttcttcttctcaatataatcctttatatctttcttgctcaaccggccttcgtatcctgtgccttgtatcgaatcaagttcttctttcggaatattcgcacttcgtgccaattgaatcaccacaggagaataccagcgttcttcagcctttgctacctgagaagatacttttcctgcatcagaagaagtattctccttactttctggagtttcttttccacttgcagtttcttcatcggatgcctcttcacctcccatatctacaacagcaaccactgtacccacagcgactgtatctccttccttaaacaggatttccactaccttaccggctaccggtgaaggtatttccgcactgactttcgccgtatttacctcgaagagaacatcgtcttcctgaatgatatcccccactttcacagaccaagagacaatcgtcccttcggttatactctcgcccaacttaggcatttttatttcgaatcttgacatagacagtaaatttattattcaaccttgaactattagaacaacccgctgaaaaagaaagttttaagttaaagtatttttaaccggactcaacgactgaagatccattcttcgcaaatatatttctcagtccgaagtttatggattgcttccaattctttctcactgaaagtatcagcacatcccttctgactaaaatattcgaaaagtatcgctttgaaatgatcaaccgtttccataggtaagtaacgactgatatttgtgacttcactacggacagacggaacagcatacacagatgatgccacacccgtctcaatgttcctctccggattcagtaccttgtttaaagcggtaagattcgtatcatacaacaaagtacaatgataaagcaccctgttcttgtgtacgcactgggcactccccgatattttcagaccatcaagatagatacccagccgttcatctccttttgccggcaatcctatctgttttaagaaatccagtatccgatgaagataaagactgaaatcaggcaagcgggacactgtttcgataaaagttaaattgacattacccaaatcatgatatacagctcccccacccgaaaaccgacgggctatttgaatctgttgttcttccgcccattcccggttcacttccaactgtacagattggtgttttcccatcactacagaaggagtgtcctgccaaagcatgaaaacagaatctgtttcctgcttcagcaaatactcttctgccgccagatgaaaataaatatctgtaaaagtgttatgaaagcacctcatgataaatctctccaaccgtaggatggggaaatacattcttctgaaattcctcaaccgtatagcccttctgaatggctattccggcaatcacaatcaattccgacgctggatttccaagcatatgacaaccgataatatgatcagcttcatcaagtatcagcttacatattccatttacctgttcgttttccgcaacaaaacgtccggaataagccattggtaacttcgtaacacgataaggaatgccctgtttggtcagctcttcttctgtcttacctacgccggccacttccggattggtgtagacaactcccggcacactgttataattcatccggtcttccactcctaaaatatgattgattgccacttccgcctcccgaattgccgtatgcgccaataaagaatagcctgtaatatcaccgcacgcatatactccgggatgagaagtctgaagatattcgtctactttaaccccattccgatgaagttctatattcagcttatccaatccgacattggtaatatttgctttacgccccacactgagcaagatcttttccgttttgatagtagaagccttcccatctttctctatgacgactccgtcaggtttcacttctattacttttgtattcaagtagaaagtgactccacgttttgcatattccatacgaagcatactgctggtttccttatccatgactcccagtatctccggcatcatctcgacaacatgcactttcactcccatactgttgaagaaagaagcaaactccattcctatgactccaccacctataacaaccaacgtttcaggaagctctttgatctccaaagcctcttttgacgtccagtaactaacttccgacagtcccggtatcggaggaataaccgtgtcggaaccggtacataccagcagatatttcacttcatatctttctccgtcacagatgatacggatcagcccgttttcttctccttctataaaggcttctttttccacgatcgtcactccgtaagagttcacagtcatctttaccccaccagtcagcattttcaccgttttctctttacggctcattattttagttaaatcaaacgaaggagattcggcagaaatgccatatttggaagcactcttgatgctatccagaattttagcagaatataacaacgttttagtaggaatacatccttcattcagacacaccccacctattgcctttttttcaaacaaaacggctctcagtccgtttgcccctgccctttcggcagctgtgtaaccagcagggccaccaccaataatagctatatcaaagttcataatcgtatctttttagtaataatacgattataacaaatgagagaagagattagttgtatgacagatcaatcatcctacttgatcgtcagctttttgagttcttctaatgtaccgttgaatacattgaggtctacatcttctttaataccgggtacatttccgacatcagtatgttgccagaaattccacttgccctgatatttcaccgaatcgacataatagtgagcgatccaataaggataagcattgaaaatagaatcgtccagataacgggtcttgaacttataagaggtataaagaatgggcttcaccccataatgggattctatacgatccaaccagcgcttaatgccttgctgcaattcttttttctcttttcgaccggtcacttccacatcgagaaccggaggcaggtcgccggaatccagtttgaccgtacgtataaaaaagtccgcctgtttcaaagcatctgtaccgggaatatagaaatgataagcgccacggataaagccatgattacgcgcattagcaaaattggtttgaaaggtagtatcgttatgatctcccccttccgtcgctttcataaaaatgaagtgcaaaggagttgccgtctgtttattctgtaaaagtctcccccagtctatttttccttgataatgggaaatatcaatcccatgaatatcatatccggaaggaatacaaactccatattcctttaaaccattacaaggtttccaccgataagcataaggacgtataaagaaataatagaaaaccatagagaaacaaccgacaattgccacagccaatatatttcgaagccaaccaggcatcgaataatgctgcttcaccggtgcctttttcggagcacgggaaggtctggaagaagaaaccgtcctcttttttggggtagtggaagcagttcttttcttttggacagcagaaatcggattattacgtgacgacatttactttgagtgatgaatgtaatatagataggcacggattacacggaatacacggttttaagaaatagtataactaaaaccgcgtcaatccgcgtaatccgtgcctgaaagagctcttcattgcaactgtttcttactacagtccggtgaagttttcttatttagcttgttccaattgcaaagtcttagttgcctggtcgcaaacttctgtaggaccaaagtactgaatcggacccggatatacataatccgtttcaacagcccaacggtcacgctgtgcagcgaatgctttgaaaggagcaccatccaatttcactaatgctttctggatcaccggtttcatttcaccgtggcggcgttccatattcatcatcatggtgataggcacaccacctgcaatccattcggcagcaggagcagttgtgttgcgtacagaagacatataaccggtcttaccgtcagcaatcagcatagaagctgtgtatcccaaagaatagcagtagtcagcatcaaagtttgacggagcagcgcaacgtccttcgtaaccgaagaagtggtgctgtgcagcaaacttacccacatatttgccatcttctttccaagcagccaatttggtagctaccatttcagacaacagtttttctgtttcgatcagtgatacctgaacgtttccgtgcgggtcacgatccagtgtcagctggcgagctacaccttccggcagacttgcatagatagcagagttttccggagacagcttacggatgatgtaatcacgttgatgagatttcttgatctgagagaactcttctgcatttgcagccaggaagtcgttcaattcagcgatcagacgcttcatagccggaataaattccaccaatccttccggaatcaatactgtaccgaagttatttccctgtgcagcacggtcagctaccactttagcgatagatgttactacatcatccagagacatatctttttcttccacttcttcagaaacgatacatacgttaggctgtacctgcaaagcacattccagtgcgatgtgagaagccgaacgacccatcaatttgataaagtgccagtatttacgggctgagttacagtcacgctggatgttaccgattacttctgcataagtcttacaagctgtatcgaaaccgaaagaagtttcaatcatatcgttcttcaagtcaccgtcaatcgtcttcgggcaaccgatcacctgtacaccgtacttcttggcagcatagtattcagccaacacacaagcgtttgtattagagtcatcaccaccgatgataaccagtgctttgatgcccaattccttgatgatctcaaatcccttttcaaactgagcttcagtttccagcttcgtacgtcccgaaccgatgatatcgaaaccacctgtgttacggtattcgtcgatgatgtcagcagtcagttccatatagttgtggtctaccagaccgcctggacccaggataaagccgtacagcttactttcaggattcagctttttgataccgtcgaacaaaccagagattacattgtgtccgcccggagcttgtccgccggaaaggattacacctacgttcatagcaggaagttgaacagcttcacccgcttcgaatgtaatcaacggcattccgtacgtgttagggaataatgctttgatagcttcctgatcggctacagattgagtagcagcacctgctacagctttaacggctcctgttgccaatgctttcggaagtttgggctgataagcagcccttgcgatttgcaatgcacttttagtcattttctttatttttatttaaaggtgttagtaagtttcttgtcaaacttgaaaagcgttgcaaatttcgcatttttcctcgaattatgaaagagaagccctcattttatttcgctgcatagttacagaggctattgcttccagccaccgccaagtgctttatacagttgtactacggtgatcagttcatcacgaatagcgttactcagaccaatttgtgcgtcaaaataaccacgctgagcatcgagaacatccagataattgatcactccattgatatattgcaactgcgccaaatccatataactcttagccgaacgttccagattggcacgaagtgcgtacacctcttttatcttattaaagttgacaatcgcattacgtgtctccttgaaagccgtcaggactgttttctcataactatgtatttctgcttcataggccgcttttttgcctttcaacgcagcacggttctttccccagccaaaaataggagtcaataaagcaccttccataacggcataaggcgattttagaagttctgacaaagacgtgctttcactaccgaaaccacccgtcagtgccagacgaggaaacatattcgtataagccacacctacttttgcattggcagcgatcagcttctgctctgcctgacgtatatcgggacggcgttccagcaaagtggaaggcatccctatcggaagagtttccgggaaattaaactcctgaagcaaacgggaacgggctatgcgattcgggtattctccggccagaaaagcaatatcattctctttcagcgatattttgcgttccagatcaggaaccagagtagctgtacgtgccaactctacctgcgcctgacgataagaagtctccgaagtaagtcctccttcaaaacggatacgtgccagacgaaccccttcttcacgggcctttaaagtctgcttgacgatatccagttccgtatccaaggcaaccagctcataatatgcctgtgccacttccgccacaatcgtcatctgaagcgcacgttgcgcttctactgactgcagatattcggcgatgctggcagaacgtgcccatcgcagatttccccaaagatcgagttcccatgaaacaaggaactgcgcttcaaaagtatccgatttcttaaaagcatctcctccatgattttcaagttcacgctcggcagtcactttacctttaatatcgggaagcagcgcggcagtggatatccgtttctgagctgccatttccttgatgcgggcagccgctatcaacatatctttattatgatccaacgcacggtctataagactgcgaagtgtggaatccgtgtagatttcctcccaatcctgatctccaaagctgaccgtatcctgatgctgagccagactatcgggtaaatgaagatcaggacggacgtagctcttgcctactttgcaggaagtcagtattcctgcaaaaagtagtatagcaatatatagtttattcagtttcattatttcttatgttttaagattttcgactttgttttatacaccatcacaaagaagaacggcacgagaatgataccaaatacgatagcgaatatcattccgaagaatacgcccgtaccaatcgcctgtcggctagccgaacccggaccactcgccagtaccatcggaagcattcccagtacaaatgcaagggaggtcatcagaataggacggaaacgtaatttcgctgcgtagattgccgactgaatcaaatcttcacctctatctacctgcactttggcaaactctacaatcaaaatggcattcttggcggcaagcccgacaagcattaccaatccgatctggaaataaacatcattctccagtccgcacacccaaactcccagataggctcccaatgctgctacaggcaaggatagcaatacagcaatcggcactgtccaactttcatattgtgcggcaaggaagaggaagacaaacaagaacaccagtgccatgaccatacccgtctgaccgcctgcctgtttctcctgataagaaagtccgctccactccagtccgatattatccggaagatggtcacgggcgatctgctccataatctccattgcctgaccggaactgtatccctgtgcggcagcaccccggataacggcagtagtaaacatattgaaacgcttgatacttcccggtcctgtcgtataagaagcattacccaaagaagtcagcggcaccatcgctccattggaagctttcacaaagaacaggttgatattgtctttatgttcccgataaggagcttccgcctgaatatataccttatatatacggttgaacatattaaagtcattcacatacaccgaacctgtatacgctttcatcgtagaaaacacatctgccaaaggtactcccagcattttcactttgtctctgtccacatcaaaataaagctggggaatctcagactgcaaggaagaagacaaaccggtaagctccttacgtttggaagcataatacatcaacgtatctgccgcatctaccaaattatcgaaagtagcctctccacgagcttccagctgcatttcaaaaccaccggagctgcccagtcccggtatgaccggaggagtagacaggtagactttacattcgggatattctctcaaatgtttttctaccgtatccataattttttcaatactggtactctttctctcttcccaaggtttcagaataacggtcagctcggcacgtccctgattactccctacacgcgggctgcttccggtcacgttctgcacatattctatatatggattcttctccagataagcaatcgtgcgttccgttactacacgggttcgctccaaggtagctccttccggcaattcaagttcaatcttaaagtatccctggtcttctaccggcaagaaactagtcggaataatccggtgaatcaacagaataacaatcaataccataccaaaagcactcaaaacccgacgaggatgtttgatagtacgggtgacggcagctacatacttattgcttccgatacccagccactcattgatctttctgaatactatatttttcttcttgccactatccggtttcaaaatgagcgaacacatcacagggctcagcgttaaagcaaccacagtagaaatcagtacagataccacgatagttaccgtaaactgacgatacagctgcccggtaattccactcagaaaacttaccggaacaaacacagccgccaataccagtgaagtagcgatcaatgcgcttgataatccgttcatcgctttctttgtcgcctcataaggactcagcttctccgtttccataatatgctctactccttccaccactacaatcgcatcatcgaccacgataccgatggcgagaatcaaaccgagtaaggtcaatatattaatagagaaaccaaaaatcagcatgaatccgaaagtaccaatcagggagataggtaccgctaccaccggaatcaatgtagcacgccagctctgcaaagacagatacactaccaacacaaccagcaccaatgcttcaaacaatgttttatacacctcatgaatagactcagagatatacgttgtcatatcaaacggaatctcataactcaacccttccggaaaattctcgctgatttcttccatcgccttctttacattctcggccacttccattgcattggcacccggcaacatgtaaatacccagtaccgctgcattctcaccattgataccactctcggtattgtatgaagaggcctccaaggatacacgtgccacatccttcagccggatgatggaaccattggcattggcacgtaccacaatatcctcaaattgccctactgtagaaagacgtccctgagtagtgataggaatcgttatatccagtccctgtaccggctgctgacctaatacaccggctgccgattcacgattctgatctttcaaagcattctgcaagtcctgcacagtcaatccgaagttagccagcttatcaggctctgcccatatctgcatagcatagtaacggctaccaatattggatacacgtcctactcccggaatacggcgaatcacatcgagcacattgatcgtagcaaagttgctcaggtaaatttcgtcaaacttaggatcggtagaagtcagacaaagtgtcattaactgactgggtgcctgtttctctacggaaataccattctgaatcacttccgccggaagacgggattcagccagcttcacacggttctgaatttccacagcagccagatccgggtcggcagatacatcaaaggtaactgttgccgagaagccaccggagttagaactgtttgattccatataaagcataccgggcgtaccattgatttcctgttcaatcggagtagccaccgcctgtgacacggtaagcgcactcgcacccggataagacgcactgatctttaccaccggaggcgtgatctgcggatattgatccaccggaagcatggtcagcccgatgattccgacaatcacaatcacgatggaaatgacagccgaaaataccggcctgtctataaaaaaactaactttcattgattattctccttttgcgttatccttcattcctgttgtagaatcacctgccaccatagtggtatccttcacctccatttccggctgactgatccgtactttcatgcccggagtcaacttatggaaaccttctacaacaattgtctctcctacagcaagtcctctttccactacgacgttattccccacttcgggtcctaactcgataaaacgtttctctactgtatcatctttacgcattgtataaatataagctccgcctttttcaatggtaacagctttcatcggaacaaggatagctccttcacgcacgtccaaaagtagttttactttggtaaactgtcccggaagtaatacctgtttcgggttaggcatctctgcacgtacggagaaagtacctgtctggggatcgacctgcggttctgcaaaatcgacatatcctttataggggtaaaccgtattatccgccaaagtaatagtaatgttcggttgccaggaacgggtagaatcctgttgtccgaggttaatattacgttctttacttttcagataatcaagtgccgtcatactgaaatcgaccaatacggtatcgctttttactactgtagccagcagagactttcctcccggaccaacaagcgttcccaagtctacatttctttcactgatatgtccggcaagaggtgaacgaacgatggtatagcctaattcgagttcagcctgcgccaagtccgcttcactcatcgctactgtcgcaacagcgctttcataagctgcttccgcattatccagatccagctgactagcagcattttgttcgtacaacggacggatacgtttcaagtcacgttcagctttcaatgcctgtgcttcatcctttttcagctgagcccgtgccttgtcggctttcgcgcgatactgatcctgattgatcacaaacaagacctgattcttatttacataagtgccttcggcaaaaagcatgttttccagatagccttctaccctggcacgtacttcgacaaattgctgggcacggattcgccccacatattctccgaatatctctacatcatcttttataaccggttcaacaatcactgtcggcatttccggcgcagccttctgaggtcgggtcagtatccaatacactcccaacacaattaccatacatactacagcagcaatggttctctttctcctcagtttcaactcatgtttcgaaaagaataatctcatatcgaatcttattatttaatttaacttatgtttgttctacactctattatgcaatacacataccaaaatatcctgttttatcttatctgtttattatcaacatattacatttttcctcttgaagacggaagtgtggaaaacatccttaaagtgtagaatttatccacatttccgacttttagaacattttttatagttcttgtttcatcaactaaacaatttatcccctacatttgtagttatattgtacatcaacacaataacatgtctaatgaaaaaacaaatcttttcaacattagtttttgcaatgtgcctgatattacctttttctgtttattcacaggaacaacggaagaaggtcggcgtcgtcctcagtggcggtggtgccaaaggagtggcacatatcaaagcactgaaagtcattgaggaagcaggcattccgatcgattatatagtaggcaccagtatgggatctatagtcggtggactttacgccatcggttatactccggaacaactggacagtatggtacgcaagcaagactggactttccttttgagcgatcgtatcaaacgcagtgccatgtcgctcaccgaacgcgaacgctctgcaaaatacattgtttcgcttcctttcacaaagaacccgaaagctgccatgtccggaggaattatcaaaggacagaatcttgccaatctgttctctgatctgacagtgggctaccatgactcgatcaattttaataagttaccgatccccttcgcctgtgtatcggccaatgtagtcaatggggaccagatcgtattccatgatggcgtactctctactgcgatgcgtgccagcatggccatccccggtgtattcactccggtgagaaaagacagcatggtattggtcgacggtggaattgtcaataactatccggcagatgtggccaaagcaatgggagccgatattattatcggagtcgatgttcagaatgcgctgaaaagtgccgacaagctcaacagcgctccggacatattggggcagattgttgatctcacttgccagaccaatcatgaaaagaatgtagaactcactgatacctatatcaaggtaaatgtagacggattttcttccgccagcttcacttcggcagccatcgattccctgatgcgtcggggcgaagaagccgcacgtgcacagtggaattccctgattgccttaaaaaaagaaatcggtataccggacaattatgtccccaaacaacatggaccgtactcttctctttccaattcacggacagtatacgtcacagatatatcgttctccggcgtagaggctgatgacaaaaaatggctgatgaagaagtgtaatctcaaagagaacagtaacattaccactcagcagatagaacaagctgtgtatcagttgcgtggcagtcattcttactcaagcgccagctacacacttaccgacactcccgaagggtatcaccttaatttcttgttagaagaaaaatatgagaaaagaatcaatctgggcatccgtttcgactcggaagaaatagcatccctgctgattaatgccacagcggatctcaaaactcatgttccttcccgattatccctgaccggccgattaggaaagcgatatgccgcacgcatcgattacactctcgaaccgatgcagcaacgcaatttcaatttctcatatatgtttcaatataatgacatcaacatctatgatgaaggcgaacgtgcctataacactacttacaagtatcatttagctgaatttggcttttcggatgtctggtacaaaaacctccgcttcggactcggacttcgtttcgaatattataaatacaaagattttcttttcaagaaaccggaactcactgggctggatgtagaatccgaacatttcctgagttatttcgctcaggtatactatagtacattcgacaaaggatatttcccttccaaaggaaccgaattcaaagctgcctattcgctctacaccgataatatggctcagtataatgatcacgccccgttctccgcactgagcggttcgtgggccagcgtagttcccgtaacccgacgtttttctatcattccatccatctatggtcgtgttctgattggaaaagacatcgcctatcccttgcaaaatgccattggcggcgaagtatacggactctacattccacagcaactgccgtttgccggtgtgaccaatatggaactgatggacaattctatcatgattgcatccgtgaaactcagacaacggatgggaagcattcattatctcactctgacaggtaattatggcttgacggacagtcacttcttcgaaattctaaaagggaaacaactgtttggtatcagtgccggatatggtatggacagtatgttcggtccgttggagattacgttcgggtattccaatcagactgacaaaggaagttgttatgtgaatctgggatactacttctaagtcactatttcggttcctgcatacataggactatacttaccatgatgagaaaaagttctcactgcgatgagacttttttctcatcatagtgagaattttttctcatcgcagcaagaacacttgagaatattcagcatcctaatctgctgttatacaaacttttcccttttctgtagatatagtaatccgatcatcatccagactaaactggcggataaaaggaaaatgcggtttttgataaggattccctcccaaataatcggatgaacattatcgggaacacgaaaaggattcagcagaacgttccagaaagaatccggcttacctaagaacatcaatgcaatgcctataataatcataaatacggcagttccgtttccactccgcgtaatggtagacagcataaaagccatatttccgaaaaagagtatcgggaacatcaactgtaatgccatctcaagcggattgaccggatacagcaataaaatggctatgtatgaaaagataatcagaataacaaaaattgccacataaatcatcaataaccgcacgccccaaaccttatacttatagtcggggattccaaagagaatctccaatatccggctatcttcatcattctgaatgccgaatacagccggatagaaaataagcagcatagacggaaacatcaggatgctatagatgagtccctcgttaatctcctcccgtttccaggcattctgaaacatgaaaagagcaaaaaagccaaatgcagccagcagaaaccagaaaaacttcccggcaaatataatcttcaggttatacctgactactttaggcaacagttgtatcaattgtttgaatgtcatatccttcttttctttttaattcatattcttcagcagacagagataagcgtcttccaaattagcttctacctctacagccccttcataaggctgtccgacagaaagatagcgcacccgaatcgtatcgccttcctgaatatgatgtattaccaacgatttgtccagtactttttcaaattctgtcttatctatattaaactgccatactttcccattagccatttccaccatgtccgaaggatcaccgaaatatttcagttcacccttattgatcaccactacctgattacaggaactggatatatcctcaatgatatgagtggagaaaataacgatacggtccttactcaactctaccagcagattacggaaacggatacgttcgcgagggtcgagtcccgctgtaggctcatccacaaccaggatacgcggtaaatgaagcagaataagcgcaataccaatacgctgtttcatacctcccgagaaagaacctatcttttcgtctttccgctcgtacatatgtaccgctttcagtacataatccagacgctcctttcgtaactcaccgtctacaatccctttcagtatagcctgataatccagaaactcccacgaagtcatattctcataagttccgaattcctgtggaaggaaacctatcagactctgtagctcttctctgtagatacgtgtatccagaccattgatccagatactaccatagctctgctcaaagataccacagatgacacgcatcaaggtcgatttacctgccccattgggtcccagtagtccgaacatacctgtctgaatctcgaatgacactccacgcaacgctttgaaaggtttgcgtcgttttccaatcataggaacactcttcaccatgcggaaataggaacggcgaagccctgcaaatcgtccggtgacacgctcaatatttacatcatgatcatacagatactgggaagtgacatagatggcaatacccacaagccataacaatccgatcatgatgaccagcccgttattatccagtttacggaataactgaaacagaataaggggaggaagactccagaatatcacccggtttacgatctttgttactcgattatctccgtatcgataatataaataggaacgtacctttctccacaaatacagtatcgctgcataaatagcgaacgagaacaggaatatccaaagcctgttatgaatgaagaaataggtgaaataaatggcaaacagtaagataccaaactgccatagcacattgataaagtccttcagggaatggtattcattgctcaatcccagacgtttgcgtaattgcaaaccactgttccactgacggctgatgtgtccaggccaatcgtagatcttaaccagattgcggacagaaatacgaatttcttcatccggattgataacctccgccttagctctccgaagactagtttgcgcaaagtatgtcatccccggtatgcctgcaatcagtgctaccagatagattgactgccaaaggattccgtcagtgtatagccagatacagattacaccggacacaaaaagaatcaggtgaatggtccatagtttacgggataacgaacggtaccactgaagcacattttccagtcccatacaaactgtcggaattaaaatcagcgtcagcatggcggaaaagaaaagtccgcctatcactgtaatggcaaaaggtgcaccgatagcccctgcatactccgtatctcccatagccaacggaagcatggcagcaattgtggtgatggaagtaatcagaatgggacgaatacgtgacataccggcagtcatcaacgccctgttccgacggtatccccgtttacgcaaaatgttggcgtaatctatcagaatgattccgttattgacgactactcccaacagaataaggaaccctgtcagtgtattcgcattcatcagactgttgctcgaaagcaataatgccagcaaagaaccgatagcagccaacggaatggtaaaaagcaacacaaaaggcgtcactacagattcgaagactgaagcaaggatcataaatatcaaaagaaaagctgccagaataaggaatttgaaatccccgaattcatcctcctcatggaatacctgcacagcgactccggacggaagattataactggcaatcaactggtcgatatcggaacgatatcctcccaataaatctttcgaagactgaacatctctcggaaaagcatagtatacctcaatctgtttatcttgattgacacggatgatgcgcgaacgcccacgtccataattcagagacgatatatcttctagattgtgcataccgccattggcattttctatccggatagcacgcaagtcatccacagttttctctttctgagctttttcctgtgcctcttcttcagtttccttttccggtatttcgtcacggataataatatcataaatatcctctcccaccttgaaagtagcttcggaagagtattcattattaagcgcagttaatccggtggtaatattgccacggttaatatcataggcagtcagcagaatagggtcaaagttcagatttatttccgcctgacggggagtatacgaaacatgagtatgctgtacaaaatcctgttcgtccaacaaataacgcacttcctctgccaccatctgcatcatttcgaaatcagatcccctgatcaccacccgttcactgttgtcaccgatgcccaacaaacgcataaatccgcccagactgctcagagccgagttatctcctccgcctcccatagcatcagaaacatagatttccgcaccattgatattggcaactttagtctgcacatccgcttttatatcggctattttccgtttggcgatctttgtgtaatcttcctgcaaaacgagtgtcagagtcgcctctttttcccgaatacggcaaatcagatctttcttttccggaaaatcctccagacgttcttccagtacctttacaatcttatccgtattttcaagcgtacttccggtaggcatcacgacactgatgttgaaccggtctgaagcaacttctttcatctgttgcacattcaaggtcaatgacaaaatcaacgttgcaaaaagcaagatcacagctccaaagactgtcactcccggattacgcatacaagtcttcaataagaccagatagacctgcatcggacgctgaacgatcgagactttttcataaacgacgctgttcccactcttactcttcaaaagaaggtaagtaatcatcggtataaaaagtaaagctacaaacagcgagatcgtcaaagttgatataatggatactccgatatggtgcccgatcagttttatcaggaaattatcagaaaaaacgaacggcaggaacacagtaatggtagtcagggtagccgccacaatggagcgccacacttcttttgttccctgcgttaccgaacgttcgggcgtatagccgtttcccgacaaacgataaatattctcaagcaccacgacactattatccagcagcattccgatggccaacgccattcctaccaaggtaagactattgatagtgataccaaaagcgtagaagaagttgaaagccgtatagacagaaatcggtatggaaagtgcgataaaaaacaccaaccgcatattcttcaggaaaagccaaagaacgaacacagccaacaatccccctaccaatgccagattaataatctggttgatattattttccatggtttcagccttgttctcctgaatgacaatttccagttcgagcggagccagcttctcattcagcttttcaatcacatcggatacacggtgtgaaagttcaatcagattagcctgtgaatcattgatcaaagcaaccgagacggcttcttttccattcacacgactataagtggtttcatctttcaagtcaaaaaagacggttgccacgtctttcagcagaataggaccgggagcgacaactatattctccaaatcagagactttggtatacatcgcattgacatggacaaaattcttgctgtcgggttcatctgcgaagcctacaaatgtcttttcctgggtattctgcgaaagcaaaccgcttattttggaagctgtgaggttcagagctttgcaagcctccggattcagacgcacttcaatggctttctgccgtcctccgtagatattgacggaagctactccatctatgttctccagatcagaacgaacatcctcgtctaccagactccggacacggtcagttcctcccgtaccacgcacttgaagcaccatgaagttattattcatctgagcaatatccactttctgtacctgtacggtaaaaccggtcggcagggaggctgcgatttcattcactttctcctgcagtttaagactggtcatcttgaagttgatattctttttaaagtcaatctgtatgctggactgcctcctgtcaatgtaggattgcagtttgtctactccacctatcgcactgaccgctccttcgagtggaataatcacttccgactctacatacgaagggtccatatcctgctgtgacgacacctgaacaaacagaaccggaagttctgcgttgggcagcaactccaccggaagttgtttatacgacacatagcccagcaggctgagtgcaataaacagcatacaaatcgttattctcctatttagtaaaaagttcatcttcagctgtttttagttcggcgatttatacgtcttttgatattctccaagacataatagacacaaggaataaccatcaaactcatcagagtagaagttatcaatcctccgatcacagctatagccatcggtgaacgtaaagatgcaccttcaccaaaactgaatgtcatcggaagcatggccagaatcgtagtcaaagtagtcatgatgatcggacggatacgctgttgccctgcttctacaatggcatcagtcaactccattcccgcctgactaagctgattgatacggtctaccagaatgatagagttattgacggcaatacctcccagcatgacaataccgatgactcccatcatattgatagtagttccggtaatgaagaaaagtaagatagcacctactacagccagaggaatagtcagcaagatcgtaaacggatgcagcaaggattcaaactgggaagccatcaccatatagacaagtacaacagaaagcatcagagcaaacaacagactgttcattgattcttgccgtttttcttcttctcctgtcactgtaatactgtagttagcaggcaattcaatacctttcaccgtttcacgcacttcggctgctactttatccagtgatttactcgcatccatattagccatcaccttaccgatacggctttgattgcgacgcagaatctccttgggcgcttgtccgtgagtaatggtagcaatctcctgtaacacaaattcctgtgttccacttttgataacaagagcaccaagagaactcaacgggatatccggcacctttatgacaatatcacgcatttcaccacgatattccatcttaccgacttccttaccgcttagttgctgcttcaattgttcgattaccatagccacactcaaattattgataccggctattgtacggtcaatcgagatcacaacttccggagcaccgtcttccacggaagtaataacatcatagattccatttacgccaatcatccgttccttcacctcttcagtcaactgagcgatctcatccagctcctctcctttgacctccacaacaataggagccccttcgcttcctaacagtgaactcagagaattctcatcctgctgaatcgtcagttccagtccgtcaggattcttggccgattccacgaaagacgcaatcaccttttccggtgaaagtgtacattccggtgaaaggatcactttcatcattgctgtattttctccttcaaatatcgcattttcggaaccgctcccctcaccgatatgactgtataccgtacataaagaatcaccgccaacgatggtatataacaattcttccagattacctacagcagcggaagtgcgttccatctgtgtgccttcgggcattttgactacagccgtaaacgtcttgctttccgcacggggcataaactctgttccgataaacggagtcagtaatccagtcacgataaggagcaacactgccataccgatcaccagccaacgtcgctgaatcagcctgcgaagcactctgctatatcctgtaatacgaatggacttcacttcttccagcttaaccttcttaccggaaagctggatatataacatcggaatcaccaggatagccacaaacaaagaagagacaagtgagaaagtaaccgtccatgcctgatctttaaacagttcgcccgaagctccgtgaagataaacaatcggcagaaagacgacaatagttgtcagagtggaagcaattaccgcattggcaacttctgctgtcccgttaatagcagcctctttgatactcaatcctttctcctgatttcggaagatactttctatgacgacaatggcattatcgacgagcatacccgccccgagcgccagtcctcccaatgtcataatattcagtgacagtccgttgaagaacatcagattgaaagtagccacaatcgagatgggaatagcaagactgacaatcagtgttgtccccatccggcgaaggaatacaaacaagactacaatagcgagaataacacccagaacagcactgctcttcacttctcctatcgcactttttataaaagtaccctgattggaaatcacctgaaaatgataaccgggcaatgcattctctatcactgccaattggcgggttacctcatccaccacttttacagtattaaagcgcatctccttataaatagacagtccgatactacgcttcccgttaatccgtacaatgttctccggacgagcgttcaaaaactgcacagtagccacttccttcaaaaaaacaggagctttattactgttggcagtcgctgttcccgaagcattgtttccggatgcttcctcttgttgtatcgctttgtatccgacaatcagattctcaaaatcatcttccgaagcaaacaagctcgaacttttcaccagatattgtaatcccagttcactgacccgtccaccggatatactctgattattcgattcgatgcgcgaagcgatatcttctattttcagttgaaaagcatccagtttataaggatcagtctgaatggtaagagtactgacttcttctcccgaaagcgtcacttcagccacgccttccagacgaatcaactcattgcggatatagctttcggcgattttccttaattccgccatatctgtaatactctgatgagacattcccaccaaaactaccggagacaagttcgcatcgtgttgcgtaatcttcagttcagtaatatccttgttctgggcaaacggattcatggctttctgcaaatctagaaaagcctcatccatatcctttgtccaggtatattctacagtaattcgtgccgtcccggctttaatcacggaagagacctgagtaacatcactctgccggatcgccatagactccatatttttaacgaattgcttttcgatctcctcgggagggcgttcacccgcctttaattcaataaacaggcggggattattcagatcgggcaataaatccacactcaactgatcgtatgatacttttcccaacaataagagggcaaatactaccatacaaatcgtaaccggattgcctactgcaaatttgattatattcttcataagtatttcctattttcaaaagatgcgttcatatatcgcatccatgatttacttttggattttgactttggcgtcttctttcagtgtttcaaaacccttcactaccaaattgtcatttacattaagtccggatagaatttcgatattatattcatcctccagacctgtttgcagattgcgtatctttgccgtattcttttcgacgatatatacgtatttccggcgacgattggacaagattacgtctttaggtataatgatagaactatcagctctgtcaacgataatatctgctttggcgaacatacccggacgcaacttcaactggtcattatcaatcagaatctttcctttaaaagtacgtgtctccgtactgattgcaggagacagctcaccgactctcgcttttaaagtatctccagggatggtataatgagtaatatataccggttgcgcttccttgacataacgaatgctgctttccggcagattgatatccatatacattttatcataagccatcagactcaccatagcctttccctgctccactcttgtatcggccgtatagtgaggcaaatcaacaatcacaccatcaaacggagctttcactttcatcttctccagattgagttttgcgttttcataatcgtaacgggcattcgttacttttacttccgtattccgcatttcactcatcgtcacccctcctttttcatagagagctttctgctttgactgttcctgttcagcaatttcaagacttagttttttagcgtcaatagcgattccgttttcatactccttgtcttccagacggattatcagttcccccttacttaccctgtctcccattttgaaaggttttccggttctcggattagtctgaagtttataaaatccgctcatttccgcattctgagatgcaccgtaagtcggctgcactgttcctgttgtatttattaatttactgatagaacctttcttcagctccacgacagataccggagttgcaatattattgggtgcgttttgtggtttgttgccacagccggttaacaataaggttgttaacaaagaagatgcaataaaaatttgatactgtttcatggtctgcttattttttatcaataatgtctttcataggaacaagagggatattcttgtcgaaatcatacaatgaaaggattttaagattaagtaattctattctgtaattaatcaacgcctgcgtataagtaatcttcttattcgaaagctgagtctggaactggctcatttccataccggttatgtcaccttcccggtaacgagtctgattcagatcataggtcaactgtgcattctgtacattttgctcggcgatcttaatctgagtccggaggttttcgaggttacgccatacctgacgaatattcagctcgatatccactttatcctcttgaaactcgagttcattaatccgttgagccatcttttgtgctttaatccttgctttcttttcaccccagtcgaaaatagggacagcaaagctgatggaaaccctcggattctgtgtcggattattatagactttattcaggtggctattatctcctatcaatccgaaagagatggatacatctcctttaaactcgttcagcgcttttgtcttaatcatatcgaactcaagttccttgctctctatttcacgctgacgaagttccagacgcgaacccaatccatgcgatatggcctggtccagatttacctgaatcggtttaatctccacttccgcaaatacgagaatatcttcatccagcctcattccgagagtctgtttgagtttgtccttcgcattctccagattcacctgactttcgtctacagacgaacgtgccgtagccagattcagttccgcttgaaagagttcgtccttcgctgctaaatccgcttctaccttattcttgataatatcataactttgctgggcattaaccagttcttcacgactgatttccagattactctgtgccatatagacagaatagaactgatcggttatacttttctccgtattcagttgctgcaaagcataactgatattggcattttcataatcatattctatttgcttcagttccattttacgcttgttgtatgtgaaaataggctgagtcaattgcagatagaggtcattgctgaatgcccggttactagttttatcgccttctataatggaactgttgtcctgccagccgaaacggttgattaaagaaatagtaccgtctgtccatagaatgggctgatcgacctgaaaggtcccactggtattgaatgtttcattcgtgtaccattgtgacagacgattatcgaaacgcctgttcttgttatagtccaccgggttcagatttaatgaaaatcgagattttaatgaagccttctgcgccagcagattctgcttatatctctccagattcatgtaggaacggcgaagagaaggactgttctcctgcgcaatctccattgccttgtcaatcgttaaaggaatttgtccttgtgatgtcagggcaattcccgtaaaagttacgattgtcagcagcattctttttaatagtagtaagtcactttgcatatagtttgctgttttaataattatcgtttcactattttcactgcgtcggctgtcacagaacgcagcttacattcatccgtcagcacgacacgaaccgtatcggcactaaaatagtaagtaccgagttgttcccaaccctcattggcttttctcagattgatataagcatcttccatctcgctgtcgtatgccaccctgaaatgatattcaccctgaaggcgatcattccatcgcagctcatcatccttgaatacatgataataaagctcatattgaccggcttccggcacaggaattttccatgtagccgtctgactgccgtctccactcttaatcacataggccgaacggatatatttgccatagtatttagcattggtggtagctgtccattgtaaaggcgcacgccaccaggatatgcccgaatatttaaaggaagtatcctccactttatccagccatttaggcagaagtcctacgacagcaggggtagaaagtacaaagagagtggaatcttcattatccacaataacctctcccggcatttctaaggatgattccggcaaggtatagatagtgtccttgactattttattccgttcttgttttacattaccaatggattgccgtatcatataaggaagattgccggaaaccatcgtattgatttccacatcacgtatctgttcttcccagacagaaacaaattctttgcttgtatgggcagctatctctaccttttttctggctctgggatcttccatcggttgataccaccagccattttgaagaacgttcatctgaataattccgtcataatccgagttattgctcaccagtactttcaagacaaagaattcttctcctcctttattgacaactttggtcagttcgggctctccgatcgaataaaaaggaagaggcgtcaattgttcccattctttcaaatatgaataaagatccgtccggctcatttctcccagagtatccagcatattttcgaactttatgttcagaaatgtattacgcttcaacatcgcatatagtgaatcccggaaagcatctacgcccatgtttatttctgaccgggcaaaaagacggcttgcctccagtcctacgatattattttgcagattacgctgttccacatcagccagcaactccttgaaagtatgcttttccagcagcaggttggccttttcattgttactaagcccatttatctgacgttcccatccttcattttccgacttcttttgcagatatagctcaatagcccgattggcaacaggccattccgaagagtaaatattgtaacggaaattataaatctgcgggaaaaggaaataaggatttgccgtagacgaaagatttccccgtcctctactacccgacgaaaagttataatcgccttctgtctgcaaaaacatccaggcaaagttactaaaagtccgcatctgggcttcctgcagactgatttcattatttcccgaccaccggatatgattcttcacctgcctcttcacatccagttcccagaatatagctcctttttcggggaacaataccatttcaggttgtactgtctcctgcgcttgcgaccaggcacgttcatagctggcaaattgcacaggaacttctacaatagaaaatcgcttaaaaggataatccagtttatattgccgtgccagttgctctttcacattacgtatcagccagggaatggtatcgtgaatagaatcaaacgaagcagtaaaatagtcatggtcccttaaatgccagacgctataaagaatgctgtccgcataagcacttttttgctgatagtcacctatgaccaacgatagtgtctgagacggataatctcctttaaacgaatacactccttcttcatcacactttccttccccttgagaaagaggaactaaccccggtagaggcttgaccttcaagcgataattactgaaataagtttgctgccagtcaggatttttatcactatagcttgttcctgcacggggataccaataagtttcaggggtaagcatcagataatttttcgtctgaaaactatactgcttgtctatgttgaacagaaactttttattggaagcttgcagcacttcgggaggaatatccaaataacaaaatgagttatctatctgtccgtcatacctgaatgttgcagagattgtatcgcctttggcatgcttcgtgccgaaatccaccaatactatttgcttgtcacgtttaaacttgagttgctgtccggccgaatgaacggaatgaatggttaatcccggattcaaacagaaggtgaatacggcagatgagtccaatgccactcctttcacagttacttccgacagaaaatcttcaagatgctgctctacagaaagatcatattcatgaatgaacatcttcggagtagaaacatattggttgttgatcttcgtataggtagcgcgtatatcactttgatataaaatcgaatgtatatgccaataaccgcatacgaaagctaacatgagagtacaaaaagaaataaccagccacggataattactgtgcgatgaattcggcagacgcctgaacagggaaatcgtgaaaaagacaaacgccagtccggcaagaaaatagatgccacgatgatttaaaatcacctcccagttggaaaaaccgacaatgctggacttcaccaaaggaagactataagccatataatcgaaaagataataaaacttatcttcaatatagaaaacggtaagtccgatatatcctaacaataaaacgaatgtcagtgcctgatttttcaataccagcatcagaaagatagccaggccaataatgaaaatcagcgtagggacactgatcaacagaaaataaagcaagtaagccatccagtccacttctcccaatgtcaggttgaatgcagccgtaatagccataataatgagattcagcaacaaaaagacgcgcagatttccccaaatcttaccgatgacgtattcagcattacttaatggacggacataaaagacttctgatgtatccagctttttatctcttttcaggaagtcggatgccagaaagatagcaataacagcctgccctgtatttagcaacagtaaaattagataaggaatgttcgatggaatggctgtagcaatccagaagcctccgctatcttccgatacgaacaactggaaattgaaaaaagtaatgatagttacagcgagtaccgtgaatactctgaagaaccagcttctgattaataatttactttcatattttgctaccgattgtatattagatataaaggtcatatcagcatatcgtgtttagtcgtttgtccaaaggtttaattgattctccatataatatacataggcgtgttccagattagggggaaatggttccgcttcgtatccttctacttcatcggcaaccacctgtacttcccagattgtccccgatggaatcgtggagattaccggatattttttatcgatctcatgcaactgatctcccgcagccctaattctccacactttgccctcggctaatttcagcatatcttgcggagaaccgttgaaggaaacttgtccccggttcattaacgccatattattacaagtactggaaatatcaccgacaatgtgagtagacaaaataatagtcacatcattctcgctgacctctgaaagaaggttacggaaacggatacgttcttccgggtcaagtccggtagtaggttcatcaacaatgattaccttaggatgatgtatcagcgcttgtgcaattcctaaccgccgcttcatacctcccgataatttattggcatatcgttcgcgaacatcgaacaaccctacgttttcgagcatttcatccacagcctgttttctctgcctgctatgggtcataccggacaaacgcgccgcgtaatcaagaaactcatacgttttgtatttggcaaaaaaacgaaagtcctgaggaagataccccagaataccgcgtatttctttccgctgtttcatcaaatcataaccgcaaatttctacttgcccggaagttggttccataagggctacaagaatacgcattaaagtagatttgccggcgccattgggtcctaataagccaaacatccctgcaggtatttccagattgacatctttcaaggcatgatttccgtttggatagatcttattaaggttcttaataattatgctcatgacattttatttgtcctatgttgtattgggtgataaagataggctttatttacaggatacaaatcataattataaacattaacttatattagtagaattctgtctaaaatgaacattcaacaaacatccatatatctcataaacgaaaaggaagaaaccacttcacagtgacctcttcctcctcatatcccatatgattattgcccaacagggtttataaaaaagggttttattaaaaaagggttatttttatgatcttaattatttattagttacttccacccttaccaccactatgagtaggattagtagtcactgtcttatactgatgatcagttccggtatagcgtgttgcaattactgaaatcttcacatccttattattatacttcactgtggtcgacaatgtagtagtacgagtcttggcatagcaagtataagtcattgttgtataaccgttcacatttacagtattataggtacgagttgtttctgtaatacctgatgccgatcccatcaatgagtataaacgagttttgaagaaagctaccatagcattaactgtttctggttttgcacctgacaaagctttttctacagccgctttaatatccgcatctttacattcccaacccgacttttctttataagtcaatgcaattcctgttacagctttaggattttcactgttatcacgacttgcctgtcctaaaatctcactcttcactacattttcggcgcttactttactagtgactttattttccatagcataggaagagaaatgcttaactttagttgtgtagctacctgatttctcatcataaacaactttattaatgtcctctgtttgtggaacccactttccattctccaaataagtaagctctatatcttgggcaaaagtcacacccggaataggattaggaatagagatcgttacagcctccttaaatgtcaaaccactaggttcaaagtgtgctgccgccaaaggtatggtcttttctacttctttattctcttcttctttcttcacttctgtagtcacagtttctggggctggtacatacgtagttacactgacttcagcattaccaccttccagaacgtcttcattaccttctgtctgaattgccccagctgggatttctaattcaggagttacaagaggaagatcttctttcacatcctccggttcaacagtacccggttctttaacttcctcattcgaagcactcttatcttctaccttaacctcttctgtattaccagtctctccaacttctacagtcgtaggttcactttgcttagtcaaagccacagcaacagtcaccacactacgattttccgcattagcagcaatttctacagaagtactttgagcaagataacctttaggagcaacttctacagaatacttacctacattcttctctgttacagagaacttaccatctttgtcagtcttaattgtctcagtaccaatttttacatcaacaccagacacacctttcccggcatccgtcacagtacccataatgtaatactcaacaaccggagcgggagtttcaatcacttcacccggctcttgctttggttcatcgtcatcatcatgacaggaaactgttacaaaagacaacacaccgaaggctatcgccaaagagcatgcatacaaccattttaaatttctcataattgttcaatttttgtttaaattactaatatcaactcttatttaagttttgtcttttcattggtacgaatcaaataataacggatataatccggctgccagaaacggctgttttcagccgatttcggttcggttctatagcttacccccaaagcacggcgagcaaattcattcccactacgcatgtcatattgaaaagcgaaataatccggaagcatcacacgtaccgcgtgacgactacgcttcttacccggcaatggaatcgaaaaatgaaatccagcatttgtttctccatctgtatacatgccataaagtcccacgatatattcaccgaagtaacgtgaaagaattccgcataccccataatctccatatataaaacgtccaccgctaactttcaattgagtattcacttgtggaatgaaataacctacgctaagctgtccattcactcttttccatttactcattccccagtcgttgccatataaatgagacgaaccggttataccaccttctccttctactgtccaacggccgtcagaagaaaaataaccaataccggttgcgagtccctgacgatcatccgagaaatttccaccagtcaggtatcccttccaatgattatccagacgaaattcctggcgcaatgtcaaataccccggtcggatgcaatcccatttgcccggctcattattgacgataggtaagcaaacctgcagcctcaatgaagcacctttccaaagttgcatttctacagccggttgcaattcaaaagctgctttatataatttgtaagtaacattattaactaacattacccccggataaaccactacatccactttcccaaaagtagtagactctcgttttgttccttttaaggcctccattgcagttttggtggaagtagtcatctgcatattacggtaaactccatccaaatcacattttcccgattgataatcctcaatcagcttcgcaggcaaagtgatacaaagttgcggcaaagcattatccaatatgaccaattgtaatgtagttacttccggaagagtgatcaggcgacgtattgcaatgcctataccattataagatcccctatatacggaagtctcaaatgctgccgtaatcgtatcctgcttctgtactacagaaatattttccatttgcaattctttcaggacttcagatatcccagcagattgtgcgtctgcactctccaaagtgcagcaacatataatatatagtatactaaatactcttttcatcttcttaatgtattaatgtacattcataacgcaaaccggcagaaacacaagtaaattcgcgtgtaaacacatggacagacaaacgtttccaaaaacgtattgctccacccaaattccatccattggtatcatactctgccatcagctttaactcacggcaaaaagcgggagtataacgaataccaccaaaagggcctttcttgaaagccggttgattgccctgatgaaaataccagcctgctgtaacagccaactgatgccccttgcagaaaccaaacgtcttagttaagacaccataataatctccccaatactgagtagccttttctgtaaaaagatcatcagcaccgattaccacagcagggaaataacggctttctttcaatggacgaatacggatagtattggaacgatcttggttgtgataaccgactctgccattatatgttcgcattttgagtaacgtcatacggtaagtcagttcaacaaaagagaacaaagacatgtctacggagtaattcatggtaggatagttaaacttattaggcgtaacctcttcaggaaggaagtttgcgcttcccataaaggttcctgtttcctgcatctcggctgtaggtatcatcatctgcccagttgccccaagagcatattgtgcatgaatccggctcgttgtcaagattagaatcagaattaatacaacaccctttaatggaataaatcgcatatcccccaaaatagcttcaatttgtttcattttttatctatgtatattcctaaatagagaccttaccccaatttgattcataaatcctctatttttaccattcttttttctgttacttcttaggtaacggaaaacacagggaaagggggaagatttcttaaaatacaaaaaatagaacatattaaactaccaaaggaagctcagtctaagcgtagggtgaaatttctttgattatgggacgtaaaaatcttagaatatgaaaaaaagggttctttcatgttccaggctatttttatcttatttttgaatcaaaaaagaaaaaaaggatagtttatttgcttgttatttatttttttgtctatctttgtgccattattatttccgttacctaagaagtaactcgcatatatttatactgattattaatactttatatcatttacatattttaccaagcaattctttacgtaagacaaattcattctatttacttcagtacgttctttcaaagcaaagcctttaaggtagatttgtgttgttttgattgatttgtgtcccaatgattcgctgatcatttcaataggaactccgcgatatttcgcagtagtagcccacgaatggcgaatggtataagaagtgacaggagaagtcagatgcaaagcctttgccagtcctctcaaatggttattgaaattccggagggcagactggtattcccgataagcactttcatctttccgctttttatcaccattcagaatactaaatagataatcagggcaatccggataagcaggctgcctgttccaaagctgatcaatcatatctttagcggtatccagtatttccacactcatcggagtcttcgttttaacacgattataatgaagaacattcctgtctaaagacgacttctccaaatgcgccaaatcagcaaacgacataccacagaattggaacatcaaagcagcaatcgcctgtgtacgtcgcaaaatatccgatttcggatctccgtataaaagcttatgtaactcagttgccggcaaagccttcttttgacggacatccactcccgtatacaccccgtgaaacaatcggtgaacataaggagcccttcccgattctactccacgattataaatactacgcagcatacgcatatacgtcgaaaccgtattaagcttcaagccacgttcataaagatactgcccgtaacaccgtaagtgttcgcgggttacttgtccgaatgacacggtaggtgtgccacaaaaccctctaaaagaaagaagtgcattttcatacacatgcgcagtagaatagcgcccctcttttcgtaaacgaccgatgtacatctcagcgcatcggctaaacccattttttttcatcatttatacactagttaattatataaatcaccttctcagatgagagaacaaatatacttcctcttagggttttaaccatcacaagaattattttatttcgaacgaaaatcagaaagcgaccctcactcacgtgaaagtcgctttctgattttcataacttaatgaacaaactaataaataattaaccttttcttaaaaatctcaaacattatatcttaaacggttgcatcttcaaatataccttatagtctttaatcatccccgttttaccggcttcagccctgggtaaataagagaatcccgtaataactttatcttcaccaagatctatcacaatctgatgaggaaatgcaggtttggaagaggaataattggtatgccagaatgttgattcctgcaaatcaaaaacatttgttgcaatattgttcgcggcatccgtttcctcactatcggcataaatcactttccaatgctgacgggataccggtttgccatcttcgcccaacaactccaattctgcaatagccgcgaaatctttcccatcatgggcgttcaaagcctccagacagaagaaacgagtctccaccttcttaccgaatttcacatgttgccaaccattgcctgacttaaatatcccttgataaacaggagtttcatttgttaagtccaagttctcacccatcttacgatgagcataagctccattaccacgttgtacatccagaattggttgacgcagaccttcagtttcggcttttgaaggaccagccatatccaatataatgatttcattctctcctttcttcaaccagcagcccggcacatataaggtctgttgaggtccgatttcccaataacgaccaatcgcatgaccattcacccataccatacctttactccagttcatcatattcaagaatgtatcccctaactcattgaggttaaacgtcgaccggtaataagccggttgattgccagcattctcctgttgtttgtactgcttatcacgggcaaaactataatctaccggaatagtatataccttccagtccttcaccagttcaactcctttatccgattgcagttctactttctcggtaatacctttccagtcataaatacctttgccgaaattcattcttcccattgcttccaccaggatatccagtctgtcaccttctttcaatggtggtaactttactacaccttcccccttcaaacggctcagagtagccagtttcttaccattcagaaagacttgtgcccagtcatgagcttctgtgatcagtaatgtctgttctttatcagaagcggataatgaagtccgatacagaatactaccccatccctgatcaaaagcttccattgtccggatatcctcactatctttggggtgaggcagattatcaaacaagactgccacttcagtcattttaatagcaggaatagctatagtcggtatcgaatccggaatttccggcaaggtttcaccttccggcaggtagttaccaagcagattccgtacttccagatatttaggagtcactttaccggattcattgataggagcatcataatcatacgatgtgcaagtcggtgaaaagttcgggaaattcgcgcctccccaatgcccgaaactagtccctccatgagtcatatacaagctgaaagaaatattgcggtccagcatttccttcataccttttaccaattcttcggcacttcttgtttcatgcttggctccccaatggtcaaaccatccggaccaaaattcactgcacattaatggagtgtccggccgtagttctttcaaccgtttaaactgctcatcgatgttagcacccgtaccgaaattaatagtccacagcaaatcatccagtgcattattctcaaaattcgagttccagtcacactggaataaaggaacacctgtaaaaccggcttgttttaccatgtcacggatttcggatatatacggcttatcgattccaaatgctccatactcattctccacctgtaccataatgatattccctcctttactaatctgaagatcagccagctgtttgcccacttcgttcaaaaagagtttcacacgttccatgtagtatgggtcttgctcgcgaagtttgatatccttcttcttcagcagccaccaaggcaagccgcccatttcccattccgcacagacataagggccgggacgcactatgacatacattccattctcttgagccaaacggcaaaacgcagctatatctttctgtccggcaaaatcataccttccttcttccggttcatgaaaattccagaacacatacaagcaaatcgtattcatacccagtgccttgcacattttaatacgatgttcccaatattctttcgggatacgcggataatgaatctctgccgcttttacaacaaacggttttccattcagcaagaaagtattcttccccacttcaaatgtgccctccgaagattgagagcatgagctgccaagaacagctactactaaaataagtaaatacaataaaggtttcttcattttctatctattgttttcatgatatatctcatatttaataaagagaattcactatcggctaatgtttccattcaaccgacagcgaatttgaaaataatccaagtgttcctaaaaactaaaataatacctattgaaaactgagtacggtgcaaagatgaggtattatgcgtaaacaaaggtcctcaaataagtcaaaagggtatgaatatcgttcaaatgaactttatttatcattttatgaactctttttacagaaaaaatcaagatatttgcaagaaataccataaacactaaaacacctcataacgggagaccttatgaataaaacgactttaatactactaataacattaattatatcatacatcaatactgcttatattcaagcacagactcaacgtgtcacagtacaggggactattctggaaaaagacacacagttccccgttgagcaagctaccatacaactgttatccttgcccgacagtaattatgtaaaaggcatttccagcttggaacagggaaaattttcactcacaactctcccgggacgttttttgctaaaaatttctttcataggcttcactaccgaatataagactctgcaaataaacacaacccagactattattcaactaggcaaaatagagttgaaacccgatgctgtacttcttaacgaaaccgtcattgtagcccaagccccgcctgttgtcgtcacaggtgatacaaccgcatataatacttccgcttaccgtgtcagtgaaggtgctgcactggaagaactagtcaaaaagctacccggagccgaaataaacgaagaagggaaattaatcattaatggtcaggaagtcaaaaaaatcatgatgaacggagaagaattcttccttaacgaccccaatacggttttaaaagaactgccagccgatatgatagatcaactaaaaacgtaccaaaagaaatcagacatggcacgtatcaccggagttgatgacggtaaagaagaaatggtactcgacttacgcgtaaaaccaagtatgagaaaaggatggaatggtaactttgaagcaggatatggaaatgacgaccattatagggcaaaaggaatggctaatcgtttcaaaaacaaaatgaacttatcaatcaatggtaccgccaacgacaatgggattaattccaatcaaagaataggtgccaactattctcagaatactcagaaactcaaatatggaggtagcattgaagtccgggaaaataaacgcgattcatggagcaagcgtcatacagaatcttttttgtcagacaacacttctcagttttccctgcagaacaaccaatccgatggaaagacaagtgctatttccgctaattttcgtttcgaatggaaattagacagcctcaccactattatgtatcgaccgacgtttaatttttccaaaggaaattccaattcagacaacttctcagaaacgctcaacaacgagtcaactcctatcaaccggaaagaagccacaaaccgccaaacgaatgacagattctccaccaatggctccttgcagttgaatcgcaaattgaacagtaaaggaagaaacatcgccttacgtctttattacgatctggatgacggcaattccgatcgatatagtctttcgaatacttattacttaaagtatggtgatagtataaaagctttgaatcaatggattgaaaaacttgacaataacaataaatatcaagttcagataacatatatggaacctgtatttaccaatcggtttatcgaaattaattatagctatcaacaccgttcctcactctctgaaaaatatgcctatgactgggataaacaagaagatacatacagtcaatatcctgacacagcgcacagtgattgctacaaaaataaatattccactcaccaaaccggcatatttttccgtactatccgcaccaactatttttataatataggtatagaagtggaggcgcaaaaaacggccaataaaagctatatgcaggacacgacctttgagtatttatccagaaatgcaataaactactcccccaccataaactttaaatataccttctctaaacaaacaaccttaagaataaactatcatgggagaacagcacaacccagtatgaccgacttatatagaaaaaaagatatttctgatcctttaaacatacggctcgctaaccccgaacttaaaccatcattcaataacaacatatcagctacatttaacacttactttactgaaacatcccgcagtttcaatgctaacctctcctataataatacaatgaatagtacaacacgtattgtcacatatgacgaaaataccggaggacagactacccaaccaactaatgtgaacggaaactggcgaataaacggttcgcttaccttcagtactccattatccaacaaaaaattcacagtaaatacacacaccaatacaaattacggcaactctgtcggttttactgtgctcaacaaagagtcagatgcagttaaaagtaatacaactaacctctttttatcagaacgtttaaaaggaagctaccgtagcgacctgattgactttgagttatctgcagaagtcagatatcgaaaatcagaacattctatcaaaaaagagaaccgacgggaaacatttgattatacattcggaactgaagcaaacttaaacttaccttgggatataaaaatctcatccaatatcaattgtagattaaaaagaggatatggcggtaaaaatgatactaaccgcaccctatggaacgcacaaatatcgaaaagcttcctcaagaagaaaaaggcaaccgtccgatttcacctatatgatatcctccgtgagaatgaaagttcggaacgttccatttccgagaattctatcaccgacagagaatccagtacatctaacgtatattttatggcatatattgcctatcggttcaataccttcggacaaaaaagaaaacgacaatcggtacaaaactaaaattataaaagaggaggaaatgatgtatccacaactacatcatttcctttttgttctttaaacatgctgagtaacattgaaaaaagtcatattgcaagatatcagagattctcaaaaggagttcggtatcaatacttgacttcccgaagattttatacacattggtccgcgcacaacaaagctgttctgcaaaccaagtgacagacaatccttgtcgatgtagttcaatttctataagccggccaacgtgtatcatattactcttgtggaataattaagaaactgaaaccacacgctcctcctccgccattttccaatcgcacaagaatacggttccacccttgacggaactggaaaggagcaatatgttcgtcaatattataccaactggtaccataatcgcgccatacatccttaccatttatccatacccgaccactatcatccgtaccgatggcaaccagcatggtagtagcctcatcaaaataaagttccgtataagcataataagtagaatgtccggtagtgacaggaaccgtattatgcattgattcactttgcataaacttccatcgcagcgtaccatccaaatacacttcttcccctatgacctttatcggatgagaatccgtttccatcacccctgtacctacttgtccgtcagtatataccgcatcaaagtccacagatatctcaggcggatggacaatcgaaaagtcctctcgcccaaagctttcccacggtcctatcatataccatgtgttaatatataaccaccctttacgatccgcgctttttgagaaacgccgtccgggcaatgcctgagcttttaccatttcctgattaagccggggacctgcataagcattcatcggacgtctgtttccactgccctgagctgcctcccccatgccaccgaaaccgttcccattgccactgccttcacctccgcccggctgaccattgccaattccaaagccgccaccgggctttccgacctgcttcactactccaaagagattttccaaccgagattgagcaagtccggcttgtcgggtcgcttgtcccaacagaccacggtaattgttcaagtctgccgtactttttatttccagacctgcgctggcattacttcccgctgaagtagcccattcccctcctttagtctgcattcgaatcagttcatcaaaacttggcatacgggaagaacctgtcttcagagaactataaacctcgggaaacgaaagtcccttggaaagcgcctgtttagctgcattggcagccaaatggttctgctgtatttcagcctcatattctcttaaaagagcatacatatcttctaccgacggattcgcagataacttgcccgcctgcggaatattccttgctttcgaagtatcattagcatcatccggtgccgtacgtggtaactttctttgctctactttagtcaacaattcatttttccgctgcctcatcttcttagccatttcctgaaatttacgaagctgatcttccaaatttttcttgaccaatacttccgactgcttcactaattgctcagaataattagcaggaagctcccgctgagcctgctcctgctttattttatcactgatacttttcggagatttctgttttttcgcttgcaagtcaatagctccctgtcctggtgatggcatcagccagataaacaacgctcctcctaccagacagaccagcgcaataacccatgataggataaccgtcagacggctactccctgttgtagttttcgtcatatgttcgtattcctatattcgttaaattataaaactgacaagcatccattacttccacaaaacgtccgaatggagtgtttttatccatatcaatgcggatacgccgacccggatcagagatacaggtctcccgcaattgttccatcatgaaattggtcgaacaaggttgtccgtcccaatagaagttaccttcagcatccagtcctactatagcctgtttatcatccggtttcagttttatagctgattccgaagtcggcagatccactgaaatatccctgtttttcaccttcgtcattgtagagacaaggaagaagatcaatagcagaaacacacagtcgatcaagggcgacatagacacttccggttcatcttcattattaaatagtgataatctcataagcttaataaggtttactacccaaacggacacgcgtacgcgtgaatccttgtatttgacattgatcgaatatctctattaccgtatttacgggtacagtccggtaagccgccacatcaatagcaatttccgtaccttcactgttgcggagttctgtaaggaaagtattcagatcagaaatcggcacatagtggttctcaccagtgtacgcatcatgtcctactacctgatacacatttttctcctcatccactgctatgataacagcttcctctccggcgcgggtggtagacaagctggaagtcattgaaggaagtgataaaggtatttgcatttcccacttcttcatcatagtagtcacaaggaagaagatcagtagcagaaagacgcagtctatcaagggcgacatctgcacctctactttgtcttcttcatcatagtttagtctcatgcttctcctccttactccccggtgtgttcatatccgtcgaatctccttccagatagagcgtagtaattacattttcaacttctacttccaccaaagaagccaatttcataatacgatttttaataatgaaatacaaagcaatggcaggagctgcgatgatcaaaccggcagcagtcgtaatcaaagcttttgaaatagaatcggacaatatagaagcgccgccttcgtcaccatacaatgctaccagaccaaacgcttcgatcataccgacaactgttcccagcaaaccgataaggggcgacagggaagctatgactgacaaaggatatatgcgtgacaaatgtgtacggatatcacgtgcggccatatcaccagctgtctggctgacagcttctcttccggctttcacatgctcgaaaataaaacgcagcgaatttcctaatgtggaagggtatttatcacaggctgcaatcgcacctttcaaatcaccttgtgcaaggcattcgctgactgttttacgcagtccttttggtgccagtcttccttctcttgaagttagcaagcgttgcaaagctattactaaggcaagcaatccaagcaaatacaacggatacatcatgaatcctcccgctttaatctgtgcagcccagtcaatctgtaccccttgcggttgttcatcctcattagttgttccctcttcatataccagcccttcctcttctccatcaacgggtaccggagttgcaatttcgctcggaagtactttcggagcattctttatatcatcctgtgtcttagcgagaaagatttcatcaaatcccgcatcacgtctctccgggcagataaaagaaataccagtcaacgtaatattaccaaaatctttccataagtccctggtcatcaccatccagtgtcccggtagttcaccgagattaagaccctccatcggatttatcaaatccttggacttgccggctatataagtaaaatcatatttcttgcctttttgatttgcagacttttcggaaacatgaaatttcattccaatttgatcacctccccattttacccaggcaaaagtgatatagcgaaactcacccggtcccggattctcgcgaataggaatggatagcccggtcagttctgccggacttttagaggctcctacatatatataattttctgattttttagagtatcccccatcacggacaaatttattatcctgagctttccactgcgccccgtccggtattttagtactaaagatttcatataatcctttaccggatctactatttgtttgggctgagagcggataagtgaaaaacgttattactcctaaaagaagtatactcaacgtaccttttctaaaaagttttttcatctttgtgcaattcatgtctattctattatttattaaaatttaaaagccaccgcaaatcatcgaatgattcacagtggcaaagttgataaaaatagaaaagaaatgagtactcaaatcattcaaaatactccaattccttaaaatgatacaaaataaagagttcaaaaatcactcaataggtttaaaaataatccattaccagaaatttccagctgttttttatctgctatatcaggttttgtatctattttcctgacactaccatcctgacatattgtggaggtaaataattatatatagagccattttcaaaagaggcagtttctaaggtgggggttctaaagtttatagtttcagcatggtatcctttaggaacaatcaattttaaatacaaaccagatatgtatccatttttcacacccttctctcttctatcatagaaatcacacataattagcttcacttttgtctgggacaagtccaatacttgcaatggacaatttaaaatattcaacgaatacaagttgacatttgaatgcaaatcaagctgggaaatagcattactactacaatccaaaacctccaaatatatatttgcactaagatcaattgtgtttagtctgttatcagcacaatttaattcttttaaataagggtagtcactaaaaaccggaattgcttcttctgatatttctttaatagaaagtttacgcagcgaaactccttccacattctctttttgctcagggagtatcaatttcttcaataaacgataatcattcccttcttggcgtatccactcatatccctgcaatccgcaagttaaaaattccatctttaggttagcactaaaatccaactctccaatataatttgcttcacaatttagttcccgcaattcttgattatgtgatgtttcaagtgcttttagcttattccaactacaatttatttttctaagatgcggtgatcgactaatatccaatttctccagattattatccgaacattcaagtatacttattccttctgtattcgatcggttatccggaagaatcaacttagataatatcccggcacgacctccttccgaaagtaatcctttatttctttgagatttaacaataaccgttcgaagttgtttattatgactaagatccaattctgtcagtcggttataagtacaatctaaagttcttaattgaatattttttttcaagtctatcgtattcaaatcacaacttctacaacttaaattcgtgagatttttacaaccacttatatccagtttcggaaggtagatttgtataatttccaactcacgaagttctttaaatctagaaaaatcaggaatacactccaatgtatcagtccgatttcccaccaactttaaccgacgtagagaagaaaaatactcaaggccttttaatgaggtaatttcatgtctcgtagttttcgctctattcacgtcattattaatccataaactggttttcagctccaaatcctccacgtaatcaatatccgataataaaatagagctggtatcagctataatcttcatttggaacaacgctgctttaagcatcggatcaaatttatctgccacattcttattatcagaagagttcaatatgtctgcccgactactcacacccatcaataataaacttactattaaaataatgtttttcattttctattaaattttatgttgtccataatcaaacatctctctacttcacctttttacatgagatgaattatcattcgcaagataagaagaaaatacgaaaaagagaaggaaagagtgtccccaaaaaggatacaattttcattcctcctttttcctcccttcacccttcacaactccctctggcacgacgattgcgggtgaaggtctcctgttcaccatccgcttcacctcccatcagacggagactacccgatacacattcccaaacttggtatgcttacgttctatccccactgctatcagtatttgtgccaaactcgccggatttgccccacgcatagctgccggatttatcttcttcaatcgctgaaagatatcagcagacgaaagaagttcacacccttctcctttttctgccgcccgataacaggaacgcaatacgtcttccacaggtccctgacgatagaacgtcatgttactttgctgcaattccgtctcttcctcttttgtaaaccaataatgttcacccgccaaaatctccgctttcaattgagcataaagttgtgcatagtcaatcccctcacaatcgataggatactctaccagcacacaaataaacctgcggctaccagtcgggtcagtcaataaatcttttcgattcgatgtcccgataaaagatgctatacgaggtagcgagcgataatttttctgataagctttgcacaggcttaatgaagccatctgcatcagattcttcaataacggcattttcgtcggagcatatttatcaaactcatccagattgagaagtcccatctccgccaatctccgttctatatgcccttgactggttaaatccaccttatccatataataacgctgaagcgcaggaggaagtagcgatttgcaaaaagtagactttaaatatccttgctccgtactgataagcaaaggcgccacactattggcatgacttcccgtaacccccatccattgtgctgtcataccccgcatccatatatggaattctttcacccacaattggtctctcgaaactctgcgtgccaaagccgccaaacggtccactccatcccataccggcaattcttccaaataaagtttgaaaggatgatactctgcaatacgggtggagaaaatacagcgtgaaagatcacgatcccaacaagaaatacctgattcgtgagcttccaggcagaatgtatttaagacacgctgattcacaggtgcaaatccttcctccattcgttccaacaaacgatattccgtttcttctgtcagcacattgtagcggaaatcatagcgggattttaaaaaagtctctacgctctcagttagtgacttcgctttcgatgagtctttttctttagacgatgatgcctctttaatcggttgaataattgtattgacaggtactgcaccttttgtatcccctactcccgtttcatcttgttttgaaagatacttcatcaatttttgccaaaaggcaaaccaaccatttttttgttccatattcttcttttttatgattaatggatgcgaatataatatcaaaaaaaagccatttgcaacttttcatcctattcattttttgaaaaccagacttatcattaatatcctatcatttcttgtttatcatactattaaaccttatctttgtcaccgacaaattatatttatcaccaatatgataagatattatcactactatgataaagtgacatcattattgtgataagatcttatcatagtaatgataagtataaaatatcagcactaaaaacaagaaatcatttaaagataaagcagaaatggcagtacaatttgaattatataagactccgatgccaaaggagaaaaagaacaagacgcgttatcatgcccgtccggtaagttttgagaccgtcaataccgagaaactggcttatcgcatccatgatcgctccacattaagagtatcggacattatttcaaccttggaagaactgaaaaatgaagtagctcagtgcctcctggaaggtaaaaaggtgcatgtcgatggattaggattctttcaggtcactctttcctgcgaagaagaaatacgtaacccgaaagacaaacgtgtacaccgggtaaaattgaaagctataaagtttaaagctgataaagaattgaaaggggaattgtgtcacatgaaattccagcgttctaaaatcagaccgcactccgccaatttatcagaagtagaaatagacatgaaactaactgaatattttgctgaaaatcagattatcacccggaaagattttcaatatctctgcggaatgacacaaatcactgcatatcgccatatcaagaggttaatggcagaaaagaaattgcaaaataaagggacgatctatcaaccgatatatactccggttccgggtaattacagggtatcggtggatttaaaatataaagaacaatgaaagagccatgaaacaggaagcccttcacccgctcttccccatttgataagggatgtagagagaaggtgaagggctgataaattatacagaactattccgtattaactatggtttcaaataattttccaaaggttccatagacaattcatcttgatttgctccccaacaataataaggctttttatccttaaagaaacatatatgaggataagtattttctcgagttaaaataaaaaatgtcccatcatcagaatgctctctagcatattcaaacttctttgtttcatttttctgcggtgtaaacgacataatttcccatctttccgcttctgtcctctttatactactttctaccatcttgtccgcagcttccttcccaaacacttcaacatatccttgataataacttttcggattcgtgtctttcataaagttttcagcatgatatatagcataaaaatatattgtttccccattatcattctgcccataaaaacaagcaaacttttctggaattctaaataccttttctgaatcgttcactaaatataatcttgaaggcgaatcaataaccggtacaaactttatagtggacttcatcaaagttaaggacaaggatgaatcattccatctccctgcaatattcatgtttaatcgttcaagtatggtatcctgaacatttttattaatctcctctacaagcagtttgttttggggtgtaagttgactgatagcttgagtaatcatcttatctctttttataacttgcttggaagtgccatcgacatacacttgttcgctacatgaaagtaatagtatctggacaagaaataggattgataatttaattgttttcataatatttcttacagatatcttttatgattgatttaaaatattaattacaactttattaattgagtgagaagagtaccgacataaatatttaatcgatactcctccattaattccagcatcaaacaaagttttcttttttcgtcaaattattccgtatccacctcttcgcgccattcttctgaaagcgcatagttattgataaacacgtatccatctaatgtggatggcaccgagatgcctaaccaatagagaatttgcggtactatcagcgtattctcaacacagattctttcagcattgacattggtaggcaatgtatttgcaaacatggcagaagctttctgttcgatatccggagaactgcttgttttatctttaatataatacatattgagtccaccttgtatctgatttttaattactaatgtatcctcctctaatttctcaagttgctctgttggcttgaatttccaatagccgagcatatcaccagaaggttcaatatcaatttctcccgatagttgcaaaaattctctttcagcaagatcctttttccatagacgtacttccgatatataataggaagttggtacagaataaccacctatcgccaaaagacttgaatccggagccaatccttgggtatccgtagttccagatccctgcaacttaccatctaaagtaatgagccaatttctccttccggaggcagcggaacttatgctaacaccatagtgatgccatttagaatcattgtatccggtaatagcttgctcaagagcaggaccttccttaggatttgttctcatggatacagttcctctctgcctatatagtccccagccggcttttccaagtatgcgatcccaattgttaccattatatgtaccgtcctgcctaggaaccatacgcattatgatctccattgaaaatgcatccatacctaaagaataatatttacctatactatcaaaaacgacagccttgtattcattctgagaatcaaaatatgcaccgtatagtctattaccattcaattgtttttccgtataatgattgtagtaaaacagaccaaatgtgttacgctccacttccgaagtgccaccataacgaccgtcagccgatccaccgtgattggaagttacaacaataagccagtcttcgtaaaatgcattctcacgggcatcaatcgccgacaaaaattcaccaatgtatccgtctatagttttaagtgcactgacataagcggcgttgtccgctttgaatcccccactcttcccagcctccaacattcctgaaaaatcggccagaatgaatgtgtaatcttcattcgcaatatgattgagaaccacatcccgagtttgaacgtcattttctgaagtaatggtagtcttagcattgttaagcatatttttgttcagtttcgcccaaggtgtcacacacaatgaaagcatattcacgtcattattcgaaatatagctaataatgttttgatagtgaattaccttttcattcggattgttcggattgtactccacattagcagtataagattcatcggttatactgtgcttttcgggtatgaccccagtgagcatggttgcccacgttacagggtcttcgttcctctcgacagacagggttcgattgtcactaactcctgtccacgaatatttactatttttcaacatcttagcaatggcaccatcggcaggaagggagttcttcaccacttcaccaaccgcaccatctatatttatccataatactttacgatggattttggtagatatgccggtatctatagttccatcgtctgctatttcagcaggtgtatcgtattccgtgcaagcatagttaaatgccaggacacaaacaacaagcaagctgtatgtgagaatatttaatagtttattcatctgatataaatttacggtttataataaaatgtaccaaactcggtaaacgactgtactctgaacctaaaacgagacatatctgtttcattccagttatcattacgattaggttcaggaagttttatacgcagatatctcacttgttcttttgacggaaaatcatagaaaccctcacttttaatattgggcaactcgggatgtgcaatggaatcaatctgcacaatttccctccaaactatattttcgtcaagcggatcattaataatatcctgattgacaggagtctcgataatcagcttagttgccgcaaagtctgagttgttgccagccagaaatacaccattaacatctgtcgtctctttcatatcaataaacaaataatacggaagtggcggagtacttgtatcgttgttgtaatatgaagtccatcctgttgatttgtcgctgtccagcaatcggtccggcgactgccctgaattaaagttatcgcttccatttgcatccagtgcataaatctcccagtcagctcgattatgacggtagtgatacccgttacttgggaaatcaaccacaccacttgatggattttctgccagaggcgagtatttccatatggctttatccatcagcggatattttgatgcataactacgggcttcgtctgtcagcgaatagccccaatgctcaaagaatggtgaaaaatcttccttaaaatagtcacataaagccttaaagaaataggtagaagtagaatgatctacggaaattttatctttaatcatacggttcaactctatataaaaagcccaatcgtcatctttgtagttagctaattgaacgaggcttgccaatgcgtatgtcggccgtacttccgactttatatcagatacaaaccagcggctactatcggtatctgcatatgccaatgctttggggaattgctccgcaatgctactgccttcttccgggaaaatcggtcccatcggatacccatcctctcttaatcctttctcagccatgcgatataggggaattgcttttaccgcatcagatacttcgctccaccagggtgattttatatctctgaaagagtaatttctatataacgcattaaaaatagcaacagaattaccggatttcaacgtttgatagctagccagctcattcaacagataatttgtattcaatgccactacaccataatcggcattacgaatatacagattgtccaacaactccacatccagcaccacacgctcaggaaaatcgggagcacgcattgaaaaatcctgtgccccaacctgcaaactgtaatagttataataataggtctcgacagcattgtcccatgcttccagtgtgttcggcatcttttcagcaatggtaggatcatcatttatcatatccaataatcgctcacgctgaacggaaaaagcgacatgccggccacgcaactcgagccacggtacagtcgttgtacgcaactgctcaacccacgctgttacatcagtagaaccgacaataaaatcaggcgaacgataagccccgttaatctccataacaaaatccgcactgccattcacatccttgcttttttcgatccatatcatacctcccaaaggattacgaatcgtgttttttcccgggaacagttgcttcgaagtagtaactaccggcaaacgcaaatagggagaaatatccgtcaaatcatctaaatgagaaccgatgataaccgtcaaccccatagtgttgtcattaatggttatagtaatcaattcacctgctccggcataaagcccggtgctgtatatcggacgaggaacttgttgcacgtcaagatcgtatgcaggaatgtatctcttgcttaaatcaagcgcaagcagtgtattgacagtattatcgactaaagtatctaccaaacctggaaaaatacgggcactttcatacatactgacatcgattccttcacctgttactatggttacattggtagaatcggcggtatcatcctctgtcccgctttcgatatcatattgataagcaatgttgcagcttcccataaaaaacatacaggaaatgaatgacagcaaaactgcatagtcggcttttagtttattaaagcatttcatattgcattctaatttaattatttaaagaaacgtaatctaatgcccagccttcaccatcgaaattccaggaagaatcaaccggctctccaaaccattgaaaaatctgataggataaatcgactgtattaagaaccgttttatagtaggaatcgtctataagtgggcataccttatccgttacaatactctcctgcctgcgcgttacgtaatcatcggtaggcgcaaacgtaccaaccggtttattgaagtataatcttttatcttttgatgtatatttcgaataatcttccaaataagataatccgatatcatcttcacgatcgttggggtaataacccaccagattattccaatacggatataattcacccaaaaggtccagttttgtagtacaatgatactccgcaataatatcagcaggtagagcaacgttgtaaaactggagatcgtttatatataggtttgcctgactaggtctgtccggagaaaacgtatgtccgatggcaagaggcgcatctgtccacatatctttactgccgtctatcttacatcccatctgatacttaccgtcaagataaaataagatggagtcacctttctgggtatcatcaacctcttttataactagcgtataagaatgccatgatccgtcacgtctcgtagatggtaagcggaaaaccgaagacccctctttaaaattagcagcaaattcgacttgcgtattattagaaaacattagctgccaaccagtacctgctttttggtatcttttcgatattatatttctattaccccaggggtcgccgtgcttatcaaacattttaaactgaatggtatatccacttttatccacctcttcatccggattggaactccatcgtttacccatattaaaaaactcggtatttccagtcataacggcatttgttgtcgctttttgtccgggaccgacgaaataaggactatagaatttgtattgtagttcatccgagcccggcctttgcaacaatttggatgcaaaccgactgttatagagcatcatgaaagaattgagacgcggatcatcatacaacgatgccggagttacattaccttcataaacaccaccataagaagatgtaataactacaagccagttttcctgaacgtaacgcggacgcgcttcaagtgctttcattattttaccgatgaaagcatctacattgtaaatcgcatcaataacctcactggtaggagttgtctcattgctccagaatccatgttgctcaccagtctgttgaacaccgccgaactgtgcaactacgatatccgagattgtttcaccattgatttcagcaataagagcatcagcggtttcactgtcggccgaagtctttcttttagtatcggcaacactcccgaaagctccgaaaaactccgtatcggaagaataaaagctaacttttagattttcatccgcctctttcaatcgttgaagaaaagaaggcgtttcgagttcgtcaattccttgattgacatcaagcccgttctttgttgttccggtcagcaaatttgcccatccacgttctttacttaccccttcttcattgtcggcaagtccgtaaaaagtaaacaaagatttatccgtcatggagcggataactggagcctttcgtgtattgtacgcctcattaacggctattccggatgcaccatcgataaccaccatcaatacgtgtcccgtagtatattcagtacccgactccggataatcatcagtcaaaagcctttccatatcctcattgcacgagaatgcaaatacagcaaacaggcaaagcattatattttttatcaacttttccattgtatttcataataagttattcataatcaacttctatcatcatcgcattgcgaaccatattaccatcaaaacgactgaaatcaccaagcagcagcaatccgtttgaattggtcgaagtacgagtttcaattactttgtagagttcaccctggaagatgcccggcacattaaattgttgcagcgcctttccatcacgacccaatataaggaaaccacggcgagttacaccatcgtatttcgtaaacgcacctgaaacaacaatattatcattatcaagcagacaggcaaaattggccaatcctccttccatttttccgatcttgaaaatttcatcacgtgtgccatcatcattcaacataactacactctgtgcaggaataccgttgaactcagaaaactccccagttataaggattttctttttgtttttattgtaccggattttagtaatacttccatttgcgcccgtaccgatgtttctcataaaagtttcatcaagggtaccttcggcattcaacttcacaatattcttcacagactgtccatcgaaactgctaaatgtccctactatgacaataccgtcactttcgaccatacaagcatctaaaatctgcccgataactccttctgcatccctgcgatagctatcatcaagttctccagtccttgacatacgcaatacacttgcaaccttcgaataatccaaaaccatactctcagcataggatttttcggtattaatacgacagtagtttgtaatatttcctactgctaccaccttctcattggaagttataaatgtacggacaggcgcttcaagagttcccccgttgaataccggtatcttacaatttatgcttgtattattctttttcgaaggcagcgctacagttttataatacgaggctacttcattagtagctatcgtgatgttattgaccggcaacttatcccagccgtattctgaaaatttacccgacagaagaaccctgtggtcactaggaaaataagtaaatgaattaaggtaacattcaatatctgtcactcccggattggccagatcaatgccggctccctgaccaggatcaagtttgaagtcagttacccattttcccgatacagagccgtctgtcaaaaccatagatatacaagaaaacctctgcgagctattttcattgtagtaggcctgcatatagtcgccaacaggataatatacccgtgcttttgaataatgttccgcacaatcgtaaataggtcccgaagtgcctttaaagccgtatgactgatctatcttaatatttcctaatacagtgagacgaggtccatagaaaacctgttctttcaatacaatataagccgtacccgaactaagatttccaggtactttcacggtgattgtcgtgtcggtagcagttacaattttagtttcttcatcagaaatatagaacttgaaatcgtaacgtcctgattgcggatcacaccagttcaacatcccttttgctttgaatacaaccgtatcattgggataagcgctttccggagaaggagattcagccagcaaaccgattccaagcggagcttttcctccactgtacggatcatctttaatattgctgttcagatcactgttacaggatgttaccaataacgaagtgaatacggagcaaacaatcattaacgaatagatggtaatatgtttcattgtactatctttatttatagttaattatccggttctgtttctattgtcgcatttatagctttggtagcgaaaagatatggttcaaaaccaaatgcatgatcggttaatctgagtacatgtaccactccgttggtcggttgtatatcagatgttgctacataagcgtttttcatatctcctatagtgaaatcatagacataagagtatatgatttgtcttgcaccggcatattttacattgtttgcatcataataaacaacacccatgttcataggctgctgaccataagataaaaatgcctgtcccggataggctgctatggcagtcgtatcaatttgaggtatatctttcagcaaatatttatcttttacaatgtacattgacagcatttcacgccagacttccggttttatctgactaaaactcttgatgctatcatgccccatacgataccaaatacggttcagataattaaaactaccacggattgaccaatcggtaggtgcaaaaaaggtaatttgttcgtcttcaaaaacatcttccataccggacagccggatgacttccaccaaatctttaaaataatcgggtcttgattccaaatattgcatcatattcccattataataagggttcgcttttccaccatcaattaaataactatcatcggcacaattgtacatgagtactgccaaaaggcaacatccgacaattttcttccataatttgatattatttttcatatctatacattttaagtttatcagagttactcccaaaataaattcaatccaatctgtgtgttgtttttcaacgcattacgatgaataggccatgtccatgcccccacattgaaattagtacgcgtcatcggattcatacaatagtttctgttatacacctttcctgtacgaaccaaatcataatagtaatgtccttcaccgataagctctctgcagcgttcccagaaaatagcatccatcagttcactacccgaggtatttatttcggaagcatgtgccctattgcggacccggttgagtaattcgcaggctttcgtatcgttagtccccaaagcggcaagagcttcagcatacaacaaaagtgcacctgcataacggaatactatttgattgccggagttggacgtaattgttccgtttccataagtatcaatattccaaaatttcttgatttccttaggagcagaacttgaaaccgaagtagaatatatcttttcgtcaaaccatagttcttttctcgcatcatcttcatacatagggaacagactcattagataatctcctgaataacaaaacactggtgtatacttattcagacaggaataggaaacattatcagaaaactttgcattcatcataaatatctcattgaaatttatattttgtgcaatctcaaacaagccttcgtctgaccctcctgcgaaaatcacggaacttctatttatatcaagtaatgaataagctccattattacgttccagttcctcgcctagcgaaacaacattcctataatattgctctttattttgtgcatcaaactgtacaagccacaagtttatatgcatcatcagcgcaatgacagaacctctggaggctctaatccctttgctcgaataagatgaatatgaccatggtagtacttccgctcccggatcatcgtcaagcaaaggttgtaagtcagcaaggcaattttgcaaaactataaccatattggttcttggcaagggagcttcattataggcatttgtataataaggcacatctccaaaagcccttacgatgaagaaataagacaagttacgcatgaaaatagcttctgccttaaaacgactccgtttcaatccatccataccgggcactttgtctatctcagcaagcagaatattggcatcctgaatagcagtataaaacacatcccattgcattattaaaccgcccctagcatcatcgggatatgtattacgcaattcacccatatcgttgttagccagataagctacatatttatccccagtgctgtaggctgttattggagcgcaccgcatatctccgctatacgtaaggaaaggacgttgtgacattgttgcattccgaaacgaattgtatatgctcaacaaaaaagcttccgcattcgtctcatttccctgcgcccaaaaatcatcacccgataatttatcttcactcttatttgcaagcgagtcacaaccggcaaacaggcaagatactatcaaagtcattattaaaactatatttttcatattcttctatatttaatcgttcatctaaaaatccattgagacaccaaatgtcacagtacgaccattgggataaccaccggatgtgtcatatcccaaattgtttacattttcgggattgatgcctgaatatttggagaaagtataaatattgttcatactaaaattaagctgacatcggctgatcctaaaaaaatccagcattttctttggaatagtataagccacagatataccgttaattttaaaataagagccatcttccataaacaatgtctggtcgtatctgaaaggctgaataatacttgaacgggtataatcaaacggattaggatattgggcatagatattatcttctgtccagaaattatatgcctcaataggtgttaaagctccactacctgtaaggttcaccttacctgctacaggtgttccataagccctaaaacggtctgccagagccttgttgataatatcacgtctcaacgtaaacgagcagttagtgttgatagaaaacgctttataacgaagattgatactaataccaccggtcattcgcggctgtgaattacctacaatcactttgtctttttcatcgatgatataatcaccatttacatccacccaaatagggtctcccgccttaaagtatgcttgagtagaagtatttcctcccatccgcaagcgttctccggtcagcggattaacaggcacgtcttcgtcagtcgcatatacgcctttatacacatagagataattccccatcgcgttagaacctaatttattcaccacttccgcatcactgttaataatctgccgcacctcgttaggcagctttgcgatcacgtctttattaattgccagtgaagtcgctacattcaaatcccaattactttgccttgacaacggacggacgttcaacgaaaactccaatccatagttaactagactcgttttcgtacttcttacggaattaaaagcattgtggttagccaactctatcgaacttagctgattgtcaatttgtttgtaatacgcctcggcaacgaacataattttattattaaggaatgataagtctgttccgagattccatgatgttgatgttaccggcttcaaatccggattcggcatagcgtttttatcaataggaataatagaaactccattataagtatctttgctcagattgtaacttccccatatatcataaatactagctttataagtggtactacgtccccaagttacacgaaaagctccggcatccagaaacttccattttttagcaaaagattcacggctgaagttccagcgaaatcctaatgaaggatttattgcccatttcgcctgcgacccataagatgaatttatttcaggacgaatattgggagtaaatacgtatttcccaccaggcagcgataactgaggatctataataagtgcaaacgtattctttttatctgaaaaattcgactttccagctgccatggacggcataccggacgaccatatatggtcacttgccaatccattcagcataataaagttaccgctatacttttcggatgaaagttcaaaacctccctgtaaatcaaaatttacaattcccaattttacggttcttgacaacaatgaacgaacatacatattataactatattcactaccgttattccaagtagccctattggcattcaaaatacccggcgtaaatttctcattctccacagttccgtatttatatcctaaagtacttctccatcttatatcaaatggcaacagatacatgatattcatacttgcatcatagactacattctgattatctgcctggacagaaaaaacagacaatgcagaattggaagctgtatacatagacggtggaggcaacaaggaagaagctgccgaacctgcggctacgccggattgtgagaaagcatttccgctaccattactatttcgggttaatgtagtggcaagatttagatccaaatgaaatctatcattaggcttatatcctactgctgccctgataccgtatcggttaaagtccgtgtttttcacaattcctttttccgtataatagtttgcattgatcttatagtcaaatttctcattaggtttaccagagaaactaagattatgagtttgattgtaagtcgtctgataaaagacaccctgccaatccgtattattattgtaataaggattcaagctatctgacagtgcctgcaatttatggatttcattatatccatgataggcggatgtatcatttcccagaatttgcataattctgagcgctctctccgccccgcctgcaagtacatctctcaacctcggtggtgttttcactacaaagttagccgaataagaaactttcggtttggctgtttctcctcttttagtttctataagaattactccgtaagcaccttttgaaccatacagggaagttgcagctgcatctttcaatacttggatattcgcaatatcttcaagtggaatcatagccaacggactgactgttgcacctgacagcaaaccagctgcatcatagcccgttacgtcttcctgcggtataccgtcaactacaaacaaaggaggagtcagccccatcataaactcgccatcaccggaagattgaacggaaatatccgagactcctcgaattgaaaaacttggaagacctccgggagtaccattattcatctgaatatttaatccgggaacacgcccttgaagcaactccatcggattagcaacaggagtattgaccagatcttctgctttaataaccgtaaccgatgctgttaccgcagccttgctaactcttttaaatccgactacaactgtttcatcaagcatattctctgtcggactcagatatatttgcatgcgttctgaaggtttagtaactttgactgaaagactgtcgaacgccaggaaagagaatacaagtcggtaaccactcttaacttttgtagagaatcgtccgttatcatcagttgtggttgaaagctgaggcacagtttttccactttcatttttaacaataacagaagcataaggcaatgtagaattattgcttttatctttgactacaccactgacaggaatatcctgagcccgaacaccaaccgaggtgacggcaatcgccatagccaacaagccatatttaaatatatttctcatattagaatcatggtattaattagttattttccatcttcaaacaagggggctcctgctgtaaatacaactattatctcccaatgagcttccttgtatatcgcaaattcaaatgacatagtggatgtcatacgataaccacttgctgtaatacggtcatataaaaaattgacatttattctattaccatctttattggtatattttgatttcatttcaaccaatggcatcggataaactacatcgtactttacatattcatctgttttctccatgttgaaaccatgaatcagattagcccagtctgtctgattaaaagatgaaggagagatcggtgtataatccggtccataaaaacgaaaagtcaaactttttacatcatcatcattatcttggttctcacgaaaataaatatgtacatcttcaggaaacatatagtctccactttctgtttgaaaaagggttaacgaatttggtgtaacatagtcctgtccctgcaccaaccctgtttccggatcgtatatactcggttcgtaatcactttctctgacaggtataagctgcatatcagtaaatgttttatatcctcccgagtttttcaccagcacatcaaaaatatagccatcactcggagcacactgcacaaaagaagattcggcattggaccacatcataaattctccggaatgctttttaacctgaaaaagagtacgatattctatttctcttttagcttctatttcttctatagacttttcggtacccatatatggagttttccaaacttttaccggaaaatattccgtcaattcaggtgcaggacttccgtcggccctcacgattcgtgatatttcgaaagtaagaggaagcgttgaattacccgatgaaaagttgtcggacatcaaagtattttttcctagttgaggacgatatagttttgtagtaaaattgacgtctctgtcgaaagcatccaaactatccggcaaatatttatcgacacacgatatgcttaataatacgcaggaaaacagcagcgcaatatttttacttcttatattcattgccataattattaaatacgtaaataaattcatcaaaaccgaaactgtgttgaggagaaaggatgtgaatgataccattatttgtataaacatcattccataccgtagaaactctgttccagttatcttttacctgagagtttttcatatcactgaaaataagctgtttgactcctccgcctacaaatccggatgccggtttgcgagaacattctatattcatttgataattgtacttcaaagaatttaaggagttatttccttcattggctagaatattatcggtatcgtaactacctttaataatgtacttgcataacattcgctcaaggtcagctctataatcataatgatattcgttaatgatcgtatcatttaaagtcggtgttataacattaacgatcgtatctttaacaacaaacggttcaattaataaatcactcaaataaatcgcttcacccaactccttttgtttacggtactcgttaagttgcgccaatgaggaacggatacatgcatccggtatggcaaaaactgtatattgcacatccgtctgttccatctgttgtatgaaatcgggaatattgttgacaagaaccatcatagaatcaaatttcaaattcagcctttcattccctgtggacaaataatccagaacggttccattaaatacttcggtttcattttcctcaggatatgaagccacttcgtaatctgtacaagacagcatccaaagggaagccgaagtcagacataaaataaatagtatcttattcattgtcgttttctttttatttccaaaactcattttgttcaatctgtgaattagcagtaatgatatcttccgataccggccagtagattccaccactgctgatcagtcgcaagaatgcctcattatctttcatcagcttttgccgacggacaaggtcataccacctccagccttctcccataagctctctgcgacgctcttcaaatatctcggcaattaagctttcgcgattattcccaaaatcctttttaaaagatacttctctcaatccacgatttgttcggatcatattcaagtaggatacagcttctgtgcttctatttagtgcgcataatgcttcagcccgtagcaaggtgatatcttcaaggcgagtgaaaacaatagacgagccaaagactccgaaatcattgtctttcgccgatccatcctgaataatctttattttactgaacaccggagtttcttcattcaaattctgaacataataggatgaatatttgatggtatctatgattccaaaccgcaagtcatcaaaattggtaaaaatcgaaaataagctgtcctttgaaatgtatatttcaggataggatttttgtaccaatggataagctaaagtcaactgttcaagatgtccgctttgagttgcttcgttatcattgtgagcaaaattaaatcctaaaatccttgaaccttttacactcgcattcgagtaaaacagccctgtttctgaagtcaagtcggcaatagaagtatattttgcattaatctcagatgcatgatctagtataaatgaagaatatgtctcggcttctgcataatttccctgccaagcacagatgtgagctaatacagagtatgcagataacttattgaacagttttccctgccattgggccccatatgaaccataatataaattcgtttgagtaccatattgatagggtaaatcctttatagctgtcaacagttctgccttagcgtaactcagcaccgtttgagcgtctgtacgaggcatagacggaaaagttccgttatcataagaataggtgactaacggcacatctccccagattcttaccatataaaaataagcaaatgccctcaaagcgcgtacttgagcaatgtcatatttcaagttttgttcagaatacgaccggtcaagttcgacagttcgtggagctttttccataaaaacagatgccgcattgattaccgcataaaatcttctccagttagatactttcttcaacaagtcatatggcttgttcaattcattatcagacacagcttgtaaatcactacgcttataaaccgtaaaatcccccttccgcaaatcaccacatatccaatgagtattgttatcggctaaggctgcgcgtgtcaagccatatactcccatcaatgctgatcgagtatcttcaagggtcttccattgttgggtttccgaagctgcatgtttgggatctacatccagaaagtcattgcaggactgcaaaaataaacaggcaagtgcggagaaaagagctaatcgcaattttttcatattgtttttcatattgtttttcattttttatcatctccgatatttttagaacttaaatctcagtcccaaagaaatggaacgaggaatgggaagcgaatacccgtcataggtaccattgaagttaactaattccggatcacctgctgaaaaattactgaaagataacagattagatcctgtcagatagaaatacaaacttttaggtatattactaccaactttctttataggaagtgtgtaaccaacagttatatttctcagtttcaggtatgacagcttttcaaggaacaaatcctgttctgcacggtaaggatgaacactgctttgcggattgtatataggataatcgtcacgctgattagtgttttgccaaaagaaaatctccttgacagactgcaaggactgaatattatccaaagtcgcaaagtcgtaacgttgctgatcgcgcagatttaaagcactatgccccaaagcaaagaagagattgaagctgaaatcgaatcttttataagcaaactggttagtcaatcctcctgtatagggtggaatggcatgtccggtcagcacacggtcattgtcgttaatctgattatttccgtcaacgtctgtccaaacaggatctcctgctttaaaaggaactccatttatgttcagtggtttcccattcataacaggaacttctgagtcgtttgtataaatgcctttattttgatacacccaaaaggcatcaactgactgtcctacttgtagtttatggtcgcctatcacagttgtcttctggttttcgggaagtttctctagtttgttcttattataacttgcattgaaagacaaatcccacttcaacggagtgttcttcaaaatggatgccgaaagatttaattccaatccctgattactgatatccattccactggccagtttatactcatatcccatttcttgagtgacaggcaaatatgtcaataaattcttttcataattcttatacagacttatttccgcaataatgcgattgtcgaaaaaagaacctttcaaagcaagctccattttatcagaatagggaagctttaaatcataaccaacccaacccgatgcatacggacgagtgattgttgcaaatccattagctgaggaaagtaacggttcgccactccatgtgatacttgtagccaagtattgaggacctaattcatatctatcggactggaatgatttggctattcgtgcataagatgcacgcaaagacaatccagacaatgcagtactacctgtaaaaaaatgattctttaaattccattcagcagaggcagcgggtgtaaacatccatctgtgatccgactggatagcggaatttccgtcgtatcttgccaataatcccacattaagcaaattcttatacttataatctaaagctattgaagtcgatacccacctattctccaaacgatcaacataacgatactgcttgaagttcccggtacttgttgtcggcttcatatcatcatcaccatcataggcacgagtataattatagtgatacaaatcgctggttatagagccattccactgaatattcaacttatgaatatcagctaaaggcaacaaatagctcgctgaagtttcacctataatccgttgattgtatcctgaatagttagatacaaagttgacggactccaacaaagccataggccaaaaagcgcgacgaacatttgttgtataatcaagtttgatgctggctgtagcattgaatctttgcttagtatagctcaaagccaacaatccattcagtaaattgttataattatcatctttagtcaaatcattggatattaaaaagtcattatacaaattgccggcaggtgcaagcggagttgaaaaatcaaccatatactccatctcagcaaacctgtctctaaaattccgattcctgacacggtctatcttagcggcattaataattgtactaacattcaagccatccaaaggaaccatattcaaggcaaagccaatattatatttcgtataagaggtattgtccgctgctcccgcatcttttgtcgttgcgagtgtaaatacataattcgctttctttgaaccaccaccgatagaagcatttacattatataagagtgatgactgataataatcgtctgcccagtccggtttaccaaaataacgtacatctcttgtatccataagataatcgggttgtttacccggtgtaagagaatacgtatcatagaaacgttgacggaatgctttttcgtatgatccattcgtcatacgaaccgaagacggagcaaaggccattcctgccgaaaccccgatagaaacgttttcaccgccataataaccgtctttggttgttatccagatggcaccattagcagctaaaggacctaatttggcaagctgaagcggatctttgataatttcgattgactctatggaagatatatccaatcccgccagcatgttggcagcggctcctatcggattaatatcaaactgcttgatatcgtacacatagctattttccagcatcaatggaacgccattcaaataaactgtcggctgaacaccggacacatctttattagaaaagacaggtgaagataagccacgaaccagcatgctttgaatggtaccaggctcaccattattttcctgtacatatacaccgggcacattccctttcagtaattgctgaatagataaaaattgagagcgctgcaacatcttgatatcaacagtatcactcaccccaaaggagtctatactacgattagtaacgaaacgagatcctacattcttctcaaaagagtcttttttcatataggtctccacagaatcaatattcacaggcgaacttgattgagacgctatcgctccactaaatcctaaaaagcccatgacagccagcaaacgacaaacaggcttctgcaaaaagaaattaggtaaaattatcaccatactattagatttataaagttatttagaccaaataagtattagttgtgcatcaaatgcatcacaaaagtgcgagttatccagtagaaagaagttctctaatcattcaaaaacttccaaaattggaccataatcgctattaactataacaggtctaaaaatcgttcaatataagttcaggaatcattcaaatgggatagatcattgatatatggaaaagtacgcatcttccattaagacgcgtacttgtgtattttaagttcatattatttttatcctaacaagatttttgatattcctttggagttacgccaaattcttctttaaaacaggttgcaaaatatttaggattagaaaatccgcattcataagctacctctgctacagatattgatttatccttcaataattgacttccatgttttaatcttatatttcgaataaactcaatgggtgacagtcctgttgctaatttcattttcctataaagagaagacttagacacagctaatgcgtccgctaactgaaccacatcaaaatctccttccgacatatttgaatttataacagaaatcactttatccaaaaactctttatcaatagaagaaggttctaaagaatcaatattgacttctacattagaacgaaactcttcctgtttgtttttcttatgcattataaaattattaatacgagcctctaatatttttaattcaaatggcttggatatatatccatccgctcccgcattataacattcaatgcgatcttccacggtatttttagctgttaataatatgataggaatgtgactggtttccaaatttgactttaaagcgcgacaaaactctaaaccatccatttcaggcatcatcacatcacttataataatatctatttcattatcttttataacgttcagagcttctaatccatcttttgcaataagcacatgataatgcttggacagaattttctccatcaaaaacaacaattcttcattatcctccaccaataacaaatgaacgtcagctatctgcgcatcttcaccttcgccaacctttgaatcaattaattcttctttctctaaaataagatccgtatttatgccatttgccgaaatatgttctgatattaattcatcttcttgataactatctttattaatgggaagatctacagtaaaagtacttcccttacctaattcactttcaacattaatagtgccatgatgtaactccactaaatcctttgttaaggataacccgatcccattagattcactttcatctcctttatttattgtataaaatcttttgaaaacattctccaaatcagcaggagcaataccttctccggtatcaacgacctgtattcgtaaatgatgattttcagactcccaatatgaatctactattaattttatatttccaccattagctgtatatttgtaagcattagataataaattagatactatcttatctagtttatctctatcaaaataagccatcaaatgtctatcttcagtcaaaaatgtaaaggtttgatttttctttctcatcagtggagtaaagtgtatcttacaaacatcatctataaacgatatgacatcactttttgatacagataatttcatgttcccactttccaccttacggaaatctaaaatttgctgtaatagtctacgtaatttattcacattagaacgaatcatagttaactgcgaaatccgactaccattcgtcatttccgcatcatcgatcaaacaagtaataatagttaagggagttaataaatcgtgtgatatatttgtgaaataacgtaatttagtttgcaccaattcttctgacttctctttatctatctgagctattctcagttcatgccgcaactgaatacgacgcttcatcctatgatagaaaagatacagacataaaagtgtaaacacaatataaaataaataagcccacaatgtttcatagaaagctggctgtttaaacacctgaacttctgctatataattgctccataaaccatttacatcagttgtctttagataaaaagtacgtttacctttaggtaattgattgtaaaatgcaaattgacgatcgcctctgacatacacccaatcatcatcaactccatccattttatatgcatatttaattttgtcaggaaacgcataatttaaagaagaaaaatctatctcaatatttttatctcctgcatttaaagaaatgatctgacttcttaaattaaaacgttggttgtttttctccaaaagactagaaacaccatctatcttgacatctgacaccatcgttctaattctacgaggattatcagacaaatgatcataaggagtaaatactgagattcctttattacctccatacagtattttcccagaacgagttttataataagaattaggcataaaagaatttaccatcacatcagtcattgtcgagtagtccatgataccaccatttttagggtcgtattcaattacccgcttattggtagaaatccaaatatgtcccaactgatctgttataatattaaaaataccttcttcaagcatatcaaacatatcggacaagttttccactttatttgtttgagggtcataagtgaacacatctccatcctgactccccatccacaccaagccattatcatccacacatattgctccaatattatcacttattactccttctgcatgagttttcaaatttcttaaattcttttcttctaatgtcagatcagaggatattttagcattatacacaccttgctttcttgtactaatccataatgaaccatctttaccttctctaattcctattatatctacaaatggaaatttagtgtcttgaagtatcttttcctttgccggtttaaccaaaatacctttagttgttcccacccaaagattatgattactatcagtataaaataaacgcggaaatcctgaattatctacgtaatctgttaacttcaaagttcccaatagctctactccttttttatccttcttcaccttgtaaatttccggataatactcagaacccagccaaatctcattaagcaatggaacagaggtaatgcagcttacatttttcagattagcaatgttttttagagaagggatatctgtataaaagagaagtttattagaatctggattataaattcctattccccaacgattctgatctatccataaatctccttctttatcttcatatatattctttatatttgtaacaaaccccgtcttttcccgaataacaggaaaagagtaattctgcactaatggtttatttaaatcaatcattgatactccttcattaaaagcagcaatccataagttacctgacttatcttttactatttcactaaaaatattatttaacttagaagaaatatgagatatatcaacagtattaattatatttccaggacgtttttgaagtgcataaagtccctgtgtagatacaatccatatataaccatacttatcatcctgagttatgctaaaacaaccattcttatcccaatgttcattactttttatatctacatgactatacatcaaatcatctttctcctctggataaagtaaaaagattccgctttcccatgttaaaatccaatgttgcttcttattatcttgaaaaactttaaatggattatttaaatctccaatctgaggcatagcaataaatgaatctgtttttgaattatatcgatgtaatcccctttcccataaagttacccaaatattcttatctgcatcttcataaatagaattcacactagtaacaggcaaagtagaatcatatcttttgcaatatgagaaatcggcagaacaacgaaaaacagaagttaatgttccaacccatacccatccatcactatccactatcattgttcgaatctcttgatccttcaaatcattgtgtgtaactggtattatctgataagttcgtttatccagtatattaataccttttttagttcctataaatagatatccatttttattttccgcaatacaagtaatttcattattcgtcaaaagatccggtgatttcaatccagaacggaaaacaagtaatcgatagccatcataccgacacaaaccgtctttagttcctaaccacaaaaagccttcccggtcacaatgaacccgcaaaacagtacttgaaggcaaataattatttaacggaagcgtagataccgacatttgttgcgcaaaggcacacggaaataattgaataaaaaacagtactatataaaatttcagttgatgtttcatagtagaattaatataaagacgtatttcttgtgcaatattaaaataaagatagctatcactattcataaatcacttaaaatatattaatttaaaactaccacaaacatatgtggtctatttttaaacctttctgaatgatttttatcccactataatcagataacttaaaattatacgtatttgaatcattccagcacctatatataaatatgattcagcaattttgcaaacaggaaacaagctattgatatttcgaatcaattttggttatactattcagtaagcaagaaataaacacagattattagttcaatcataaataattaatttataaaacatttctgtatcatgaaaaaaaaatatgtgaagattatgtttttatcattgacattgctgacaattagcacaacagctacttatgcagttcaacccaaagatgataaaaaagaaaatgaagccttacaaacctcaacagaggaacatctaccattactaacgattaatggtacaaacgcatcatcatccttcattgtcaattccgaggctttactcgacaaagaaataacaattacagctccaaacggtttcaccgtaactccgactgttatagcagccaactctgggaaacaaaaagtgaaagtgaccttaaacagtactaaaagactgactgaagggaaaattattctgcgaagtggagatatccgttcatatataaaagtaaaaggatttggaactgcccttccagtgaaagacattgcagcatctcctgtttataagaaaggaaatgatacggaatttaccaaagcattcactccaaattcaaaaggatatactatcgaattcaaaataaaaacagatgactcggagaaaagcttttatccttattttgtaaacgaaaaaggttatggattcaaagcatatattacctctaatgaaatcggattattcaatgcctacaaaaaagaaattaccaatcctgcaacaaatggaaaagcaggaggaaaaggtaagttctataataatgatggacaagcacatatttatcgttttgccataacaccagataaccgtgccttcatttacagagatggaattcctgtagattccgttagaattatagactacgctccccagccaaactttgcagagaaagttggcaaaccagtagaaaatcttttaaagaacccaaacttcgaaggagaatttgatataaatccagaaacgaagttagttagtagagtggaaggatgggatgttgttattagcgaccgttggaattcagaacaacaaattcttcctgaagaaattgataataatcaggacctagacaatcatgtttttgaaattagaccctataaatgggcaactggttggagtgatggtatcctaatgcaagtagtagatgttgtaccgaatgaaagttacacactatctgctctattaaaaggaggaatagcaaaaaaagaaggaaaactcaccggtaaaatgattatagaagaagtgcaagaccctgaaaaaaaagtcatcacagaaattgccagtgacaactgggaaacttattcaatggactatactacttctgccgaatgtaaccaaattcgcgtatcctttacagtaggacgtggaggatggggaaatgatatcggagctgtccgtgtagacaacgctaaactgaccggcacatcacgtacatactcgcccaaattcggttttatagataatactgctgatgtggaatatttcacaattgacgaatctggagcctatgcccctgcacagcccgaaataactattaatattgaagactaaaataacaaaaacatgagaataactctatttatctgctttatgttctcattcacctctattttttcacaaaacacccagatcagtccgggtgttttgtggaatgacatagatggggagcaaattaacgcacacggtggatgtgtcgtttacgaaaaaggaacttattattggtttggagaagatcgtacaggttttaaatcaaatggggtaagctgttatcaatctaaagacttatacaactggaaacggctgggattgtcgatgaaaacgacaggtgaagccagagaagacatgaatgatatatcgcagggacgtttgttcgaacgtcccaaagtaatttataatccccaaactaagaaatgggtaatgtggagtcattgggaaagtggagatggatatggagctgcacgtgtttgtgtagcaacaagcgataaaataatggggccttatgtactttacaaaacatttcgccctaataaaaacgagtcccgtgatcagacgttattcgtagatacagacgggaaagcatatcatttctgttctacggatatgaataccaacatgaatattgcattacttagagacgattatctggagccgactccgacagaaactaaaattttaaagggacttaaatatgaggcacccgctatttttaaggttggggatatgtattttggattgttttccggttgcacaggctgggagcccaatcccgggaaaagtgcctacagtactgatatactggggaactggacaacagggaataattttgctgtagacaaactcaaacaagttacttacaactcccaaagctgttatgtatttaaagtggagggtaaagaaaaagcttatatatacatgggtgaccgttggaactctaaggatgtaggaaagtctcatcatgtgtggttgcccattagtatgcgctcaggctatcctgtcgtaaaatggtatgatcaatgggatttaaccgtgtttaatagtatgtatcgctataaaagagctgcagaaatcatacccggtaatatatactcattattagaaaagacctctgatcgtttagtgtctaaacctgccaatggtttcagtatagcggatgatgatgatgacatcaatctaagtctggagtttataaagactaatatacccaacgtatataaaataaaagataccaaaaccggaaagtttttggaatcactgttcggaactttacgcctgaattccgagaagaaagatgatgctcaatgctgggtattcaacctacaggaagatggttattatcagatacaaaatctgaaagataaaaagtatgttacagtttccggttcaaatacatttgccggaagtaatttatatcttactgaactatccaagaagttaatgcaagattttgcagtatatttcgattccaataaatataaatataaggaagcagatatattctctgatgcctacaaggctaataatctaaaacagatgaaagcccaataaatttctcatatgtaattctgataaattaaatttgttacattatgaacataaaaagtcaacaggcaaaaaatagttttttattcatatttatatatctatgtagtctgtctttgcaaccagctttcgcaactcaatcgaaagaagttataacaacagatatctgggcagccactgccactgtattcaaacttgtcggtgaaaaagctgtcaacaatgtaaaactgaattggatgcaacgagaggacgccgacctttataaaatctaccgggatggaaattgtattggagaagctaaaggaaatacatacgatgattataatctgaaagcagataaaacttttacctaccatgtagaagcatttaaagaggggaagaaaatagccacgtccgcttctcaacaagcaacaaccttcacccctaacggcgaaactaaagtttatgataatctaaacggaaaatatatcaccaaagaatctgcccaaaaacctcagggtatgaaaattggggagctttatttctcttataaaatggaaaacgttgaaaaggaagtagatggacaaacactcaaaggatggctagctacagaaagcttttctccgacagggctcaatggtagttggagtacttcccgtgaactggctttttacccaaatgtaaaatttgagggtattgctttccgatataacgcaaaaaccggtaaggtagtactttcagcacattatgaagatcaaagtggatatgttgcagctaaaatctatctggcacaaataactcccaaaggcgagctcgaagtaggcactatggaacgaccattgggctatgactctagagatcaatctcttttcattgatgatgacggtacagcttatctcctttcagctacaaatatgaacagagatataaacatctataagctagacccttcatggactaagcctgttttattagttaatacaatatgtaaaggactacatcgggaaactcctgcaatcatcaaaaaagacggagaatattatttcttcagttcaaaggcttccggatggtatccgagtcaaaccatgtatacatctgccgctgatttaggaggcgaatggacacctatgagagaaattggcaataattctacttttgatgcacagtttaacagaatcagtacagttggaaaaacctgcggagtatggagttaccactggggagcgcaacgaaaatataaaactccggctggcaatttcccgagaatttcaatagccgcatttaacaaaggatatgcttcgatggattattacagatacctggaatttagtgacaaatatggtattatccctgttcagaacggtaaaaacctgacattaaatgtaccggtgacagccgctgtcccaggagcgagaggaattaaagctgattgtatcacggatggagcttgtactgaatcttctacttatttccagaaaagttcaaatgctgctacaggttctccttatatgtttaccatagatatgcagaaagaagccgtgatttctgagattaatctttcgacaagattggttaacggttccgaggctgcctacaaatataccattgaaggaagccgggatggaaaaagttataaaatgctcgtagacggcaaattaaactggcaggtaggatttctaattctgaatattgaagatccgtcgctctacagatatttacggctccgcgtatacggtgttgtcaatgtacataaaaacaattctgcaatgtgggcagatggcatttatgaatttgctgcttacggaaaaccacaataaataagaaagcaaagtgtattagaaaaagccagttaactatttaaatgttgactggcttttcattttgcatcgatcacaaaaagttaccctattaagctttctgtatttaacgattccattattcgttaatatataccattttgtacaagcaaataataaactaaagcccaatcctgatcatttgcatatggatcgtagaatccgccctttactccgttaaccttatttggataaatataggcgcaagaagcttttccatcttcaaagaataaacacagattatttctcacaatattctctgcacgctctttatatgaatgatctcccgtacattgcgaataaagataaaaagcagctcctgacaatgtactccaatagtgtggaaaagtatctccccacatttcccgcttaccaaaccaataaccatcccaatgacgaacagctatttcattcaaatgataactgggttgtttgccattgaaagcttccaatacaggcatttgaatctttgccccatccaaatatttctgccttccggtttccatataaagttgaagcaagaacatgactgatggagctacaatggcttgttcgtagtttacttcactagccggataattcaaaccatttttcaaaaaagtatcaccaactgcaatataatcattctccagctcttgatattctctttgcatatcagcattttttaaagtttgtagtcctaagcgaaccggtatacctatggcataaaaaccatgtccgaactgtttgaacatagaccgcaaagtcatataaccatgtttagcatattgtttgtcattggttattttatacatctggaaataaaaatccgctacccatacataattgtacgccctgttacgtcccttctgatcgactgaagagaaagtcttatagtcagcatcttgcaatctattacgcaaaaaacttgcatatcgcaataaagacgcctttacttcagcaacaggatgcaattgataatactttgctaaaagtacccccataccgactctttcagcaccttcatccctgtcaaccggattacagttatgcgtattattcagatatatttcattcttttcattatcataaaccatataagcatctctacgcgtattcgaacttttcatctgttgatttgcaactataaactctactcgttttttaatcaaatcattcacattactaatcaccaaacaatttgcatgagtttttttccctgcgccatatagtatatcaaaacgcacttctcccaactgatccattactacttcagcataccatgctgttccttgttttttcatagggatagtgacatcattctttttaagtatacagtcttttaccatctgcccacctgatattttcacaagggcagtttctcccttctcaaatacatacttgttgcaagatacccagacactctctctttccaataacttttgacggaaatcatctccacctttatgcgaaaagatataccacgaaaatacttgttcatcacccggcatcaatttcatatccggaagattcaaagaaataattcctcttgtatgagagttacccttatttctatcacgctctgatatttcataacttttaatttcgccttccctcaaaaccagtcccaaatgtggagcatatcctcccatacgtgttgcgtttacataagctgcattatcaccctcccatatatgagcgttagcccgcatatttatacaagcttgtgcccctggatagttatcgttgaatggagtatagatgcctatatccgataaaagtatttcctctgttccatcgtttcggaaagtatactcttctattaaatcttctcctttcatactcctttctacaaggatacatatatctccaactcggtaagtaacttctctcccatcctgctttatactggcaggaagattccaaaacagcttgtttttctgatttcttctcacctcagtgaaatagccaagtccccaaccataattctcctttatccaaggatattggctaccatctgttgctatcagccaattcatgttctgtttatcattatcaatattcattgattgtatagctccagttttcgaattcactgtaaagtttactttttgggctttaacagaaatgcatattactgtcaacaacccaataccacaaacctttaaaaaaggattctttacttttcccattgacatcgtcctatttttcttaaaacagggcttacttcttttagataaatctaaatccattgtttctcatttaattaattatagttattaaaaatatcattgctaagtaattattcaaagataattcttttttaaatgggaaaagttctataatcattcaaaagggaacagtaataaataaaatacctcatccttgtcgagggcaattccccgtttgactaaatttcattcaaatccgttcaattttaattcaacatttcaaaatccggtggattagtcagttgtatatccaagcagagtacacttagagagcaaatagtaaaaagaaaaaattcaatccatttattcgctagaatcaaagaaagtccctatctttaccccaagcaatttttattattcaccattaaatgtaaatattatggcaagtagaagagaacttaaaaagaacgtaaactatatcgcaggagaattattcactgagtgcttaatcaatagtatgtttatccctggtactgataaggctaaagctgatgaactgatggctgaggttttaaagatgcaggatgaatttgtcagccgcatcagccatacagaaccgggcaatgtgaaaggtttttataagaaattccgagtagatttcaatgcaaaagttaacgagattattgaggccatcggaaaattgaactaaagatcagaatgaagaaagcaatttatagctttatctattaccgcctgttagggtggaagacaaacgttacggtacctaattatgataaatgcgtgatatgtgccgcaccacacacaacgaaccttgatttatttattggaaaactgttttatggagcattaggccgtaaaacaagtttcatgatgaaaaaagagtggttcttttttccgttaggaattatttttaaagctgtaggcggaattcccgtagaccgtagtcggaaaacttcgttagttgatcagatggttcatcattttgctgaatgcaaaaagtttcatctggctatcacacccgaaggaacccgcaaggcgaacccgaactggaaaaaagggttttattacatcgcccttaaggctcaagtgcctatcgttctgataggtattgactatagtacaaagaccataacgtccactaaagcaattatgccgacgggagatcttaataaagatatgcgggaaatcaaactgtacttcaaggatttcaaaggaaaacatcctgagaattttgcacttggagaactttaagaataaagtaataagtaataggtattaagtattaatcgtagctgctgaaatgctgcttcgcatggtatattacctattacttattccttattacctattacttattccctattacttaaaacaggcatcatggattcgattcgtatttccatagtacaaaccgatatcgtttgggaaaacaaacaagaaaatctccgtttgctccacgagaagctgcaaagtctccgtggaacaacggagattgttgttttaccggagatgttttctacaggattcagtatgcagagtgatatgctggcggaagcaaattccggtgagacgattacagcactgaaacaatgggcttctttgtttcaagtggccatctgcgggagttatatcactgtagacaacggaagatattacaatcgcgctttctttctgacgccggaaggagaagaattctattatgataaacgccatctgttccgcatgggacgtgaggcagaatatttctcggcaggcgatgaacgtctgattatcccttaccgtggctggaatatctgcctgcttgtatgctacgatcttcgttttccggtgtggagccggaacgtagccaatcaatatgacctattaatatatgtagcaaactggcctatcccccgccgtctggcatgggatacactgcttcgtgcccgtgccttggaaaatcagtgttacgtatgcggggtcaacagagtaggtatagacggatatcatctgaaatacaacggaggaagcaaaatctattcagcgctcggagaagaagcggcctccgtgcccgacgaaacggagggcatagcaactgctacgcttcatctgaccgcacttcatcagttcagagaaaattttccggtatggaaagatgcagacgaattccaactccgccattcgtgataaaacaaatgttaaaaacgatttgaaggtgcaacaatacctagaagttagtagttaattatatagacttcttttgtatctttgtcgtgaaaatacagtcgtaaggactctaatcttacataacttaattaacaactttatgaaaacaaatcttagttctcaaatcactctccacagggtctcccccagatactacagaccggagaatgcatttgaaaaatcagtcttgacaagactcgagaaaatacctacagacatttatgagtctgtagaagaaggggctaactacattgcttgcgaaatagcacaaaccatccgcgaaaaacagaaagcaggacgcttttgcgtactagcactccccggaggtaactcacccagtcatgtctattcggaactgatccgcatgcataaggaagaaggactgagcttccgtaacgtgatcgtatttaatatgtatgaatactatccgttgacagccgatgctatcaacagcaacttcaatgctttgaaagaaatgttgctggatcatgtcgatattgacaaacagaatatattcactcccgatggaaccatcgccaaagataccatctttgaatattgccgtctgtacgaacagcgcatcgaaagtttcggaggtattgacattgccctgctgggtatcggtcgtgtaggtaatatcgcattcaacgaaccgggttcacgtctgaactctaccacacgtctgatcttattggacaatgcatcgcgcaacgaagcatccaagattttcggaacgatagaaaatactccgatcagttctatcacaatgggagtatctaccattcttggcgctaaaaaggtatatttgctggcatggggggaaaataaggcagcaatgatcaaagaatgtgtggaaggtccgattagcgacactattcctgcatcttatctgcaaactcacaacaatgctcatgtagcgatcgacctttcggcttccatgaacttaacacgcatccaacgtccatggttggtaacatcctgcgagtggaatgataaactgatccgcagcgctatcgtatggctgtgccagttgacaggcaaaccgattctgaagctgaccaacaaggactacaacgaaaacggtctgagcgaacttctggcattgtttggttctgcttacaatgtaaatatcaagattttcaatgacttgcagcataccatcaccggatggccgggtggcaaacctaatgctgatgatacttatcgtccggaacgtgccaaaccgtatccgaaacgtgtggttatcttctctccgcatccggatgacgacgttatctccatgggtggaaccctccgccgcctggtagaacagaagcatgaggtacacgtagcttacgaaacttccggtaacattgccgtaggtgatgaggaagtggttcgtttcatgcatttcattaacggattcaatcagattttcaataacagcgaagacttggtaatcagcgagaaatatgcagaaatacgcaaattcctgaaagaaaagaaagacggtgatatggacagccgtgacattctgactatcaaaggtttgattcgtcgtggtgaagcccgtaccgcttcttcttacaataatattccgttagatcgggtacatttccttgacttaccgttctatgaaaccggcaagattcagaaaaatccgattagcgaggctgacgtagagatcgtacgtaacctgcttcgtgaaataaagcctcatcagattttcgtagccggtgatttggctgacccacacggtacacaccgtgtatgtacggatgccgtattcgctgctgtcgatcttgaaaaagaagaaggagccaaatggttgaaagactgtcgtatctggatgtaccgtggtgcgtgggcagaatgggaaattgagaacatcgaaatggctgtacctatcagtccggaagagcttcgtgcaaaacgtaattctatcctgaagcatcagtcgcagatggaaagcgctccgttcttaggtaatgacgaacgtctgttctggcaacgtagtgaagaccgtaaccgtggcacagcaacgttgtacgatcagttaggactggcatcgtatgaagcaatggaggcatttgtagaatacattcctctataagaaagaagattcttaattaatagaatataaaacaatcaaagaagagtgggcagttcgatacttcccactctttttttgtttatttttgcaggagattttgccacagaatgcaatggacttacatgaacgcgagattcatttcgtattctccttccaaaagggaaaatgccatcaaggggaaagtggcggacatagataatcataggatgcaacctaaagagtggaacgatgaaaaaaataatagtctttcttctgtgcctgataatgggcaccagtcttctcttcgctcaggacattgagagaaatataaaagagcggttaacggattactttgccaaatacacagcgacagcaaaaatcagtacaccgaaactgaacagtttcgatattgattatgaccgcagaaccattcagatttatgcttcggaaagcttcgcctaccagccatttctgccggaaacggtagaaaccatctacaatcagatgaaagaattactccccggtccggtaaactattatcagatcaccatttatgcagatggaaagcccattgaagaattagttcccaacttatacagaagcaagaaaaaggataaagaacgaatggcgctgaacaccgaatacaaaggtgctccatgggtgaaaaacacttcccgccccaatgagatatcccgaggattgcaggaccggcatattgccctctggcaaagtcacggtaattattataagaatgacaaaggcgaatggggatggcaacgcccccgattattctgcactacagaagatatgttcactcaatctttcattcttccatatgtcattccgatgttggaaaatgctggtgccatagtgtatactcctcgcgaacgggacacacaaaagaatgaaatcatcgttgacaacgatactccgaatgcttccctttacctggaagcaggcagtaagaaggcacgctggacgactacttccgtgaaaggattcgcccagaaaaaagccatttacaaagatggggaaaaccctttcactgacggtaccagccggtatattcaaacagaaaagaaaaaaaagaagaataaggatcaggcttttgccgaatgggtacctaccctgccggcaaccggaaaatatgcggtctatgtttcatatcagacactacccaatagcgcgagcgatgccaaatacctcgtctttcataatgggggtgtcacggaatttaaggtcaatcagaaaataggcggcggtacttgggtgtatctcggaacttttgagtttgacaaaggaaataatgactacggtatggttgtgcttagtaatgaaagtagcgagcatggcgtagtgtgtgcagatgccgtacgcttcggaggcggaatgggtaatatctcacgaggaggaaaaataagcggacttccccgttatctggaaggagcacgatattcatcccagtgggccggtatgccatacgatgtatatgccgggcgtaaaggagaaaacgattatacagacgatatcaatacacgttccaatacaatcaactatctgtcgggaggctctgtctataatccgggacaagcgggtttaggtgtacctctggaaatgactatggcacttcatagtgacgcaggatgcagtaaagacgatgaaatcatcggttcgctcggtatctataccatcgatttcaataatggcaaactaaattcgggaatggacagatatgcttcacgtgatcttgcggatatcctgctgactcaaattcagaaagatattcgtacgaactacaatctaccatggacacgccgcagtatgtggaaccggaattacagtgagacacgacttcctgccactccttccacgattatcgaattgctctctcatcagaactttgcagatatgcagctcggccataatccgaatttcaagtttaccgtaggacgtgctatctacaagggtatcctgcaatttataaacagtcagcatggcaaagactatgtagtgcaacctcttccggtcagcaacttcgctatccatttcggaaaaaagaaaaatacactggaacttacctggaaaggggaagacgatccgctggaaccgacagcccgtccacgggaatatatggtatatacacgcatcggatacggaggattcgacaacggaactctggtcagcaaaccctattacagtgtcaaagtagaaccgggacttgtctattcattcaaagtgacagccgtaaaccggggaggagaaagttttccttctgaaatcctttcggcttataaggcaaaacgtgaacgagagagaatcttgattatcaatggattcgacagaatcagcggtccggctgtcattaacacaccggacaaagccggatttgatttggaacaggatccgggagtgccttatttgtccaatatctctttttgtggggcacaaagcggattcaaccgttcacaagccggaaaagaaggagaaggcagcctgggacatagcggcagagaactggaaggcatggagatagcaggaaatacgtttgattatcctttcatccatggaaaagccattcaggcagcagggaaatacagttttgtttcgtgcagcgacgaagcggtagaaaatggaatcgtcactttagaagattacccgatcgtagactatatactcggacttgaaaaggaagacccgatagccaaagcatattacaaaacattctcttcaccgatgcaaagactgattacaagctattgccagtcaggaggtaacttgttcgtcaacggtgcgtatgtgggaagtgacatgagcggaacacaagggaaccgggagtttacagagaaagttttgaaatacggttatcagaacagtctgacagacaaaagttccggtcaaatcaatggattaggacgcagcatcacgatcccccgcctgcccaatgaaaacagttatgctgttacagcaccggattgtattgttccggtagctcccgcatttccagtatttacttatgcacgtggcaatcagtcggcaggtattgcttacaaaggggcggactatcgtacctttatactcggctttcctttcgaaagcattcagtccgaaacagatcgagccagcattatggcagggatactaggtttctttactcagaaataaagtactcacggatataagatttattttctgaaagcccggataaaaatatccgggcttttttaatccgtttttcattttaaattctatctttgctcctagtaataacccttaaaactaaaaaacgatgtatactatacaagcaaaccctagcggtacacgcagcatagaggtgtccagcgaaaatctgaaaacaatcgagaaatatgccttattccgccatctcatcgatagtaccggaattgtagacgaacccgtactggataaactgaaactaaatattcgttccctgattgccagtcaggaagaggacagtaaagaattgctggatctttgcatagatgttatttatcacaataacatgaaagcattcggcctgcaacaactcatcaagctctatctcacctggctttccactcaggatgcggaagaggaggaagaataatgattacggtagatacctgcggaacaacagcttacagtcctttgattcctgcaatcaaagctatatgcgaggctcctttcggtgaaacgctcgaaattatcatgaatcatgcagatgctttccaagacttaaaggaatatctttccgagcaaagcatcggttttcgtgaaatctatgacggagagcaaatgacattgcaatttacaatcaatgagaagttttaaaaaaacatcttaatgattgaagttaaacatcccaatgaataaaaaaatcattgggatgttttttattatccgtatctttgcggcatgaaagaatatcgattgaccgattggttacctaccaccaagaaagaagtggaactccgcggatgggatgaactggatgtcattcttttcagcggtgatgcttacgtagaccatccctcatttggcgctgccgtcatcggacgtatcctcgaagcggaaggtttgaaagttgcgatcatcccccagcccaactggcgtgatgacctgcgtgacttcagaaagctgggtcgtccccgattattcttcggcatctctgccggaagtatggactcgatggttaacaaatacactgccaacaagcgtctgcgcagtgaggatgcatacactccggacggtcgtccggatatgcgtccggagtatccctccatcgtatacagtcagattctaaaaagactctatccggacgttcctgttatattaggaagtatcgaagcgagtttgcgccgtctgagtcattatgattactggcaggataaagttcagaaaagtatcttatgcgatagtggcgcagacttgctgatctatggtatgggagaaaagccgataatagaactaacccggaaaatgaaggaactgcttcctgcggaggatgcttcattgacagccggcgaactcaagaaaatagcaggaaccatccctcagacagcctatctctgccgtacggcagagtggactcctgccgcaaacgatattcagctttactcacatgaagagtgtctggctgataaaaagaaacaggtcagcaatttccggcacatcgaagaagaatccaataaatattcggcttcccgtatcacacaagaggtagataataaagtagtcgttgtcaatcctccttatcctccgatgagccaggaagaacttgaccattcgtacgatctgccctatacccgccttccccatcctaaatacaaaggaaagcggattcccgcatatgatatgataaagttctccgtcaacatccatcggggatgcttcggcggttgtgcattctgcaccatttccgcacatcaagggaagtttatcgtcagccgcagcaagaagtctatattgaatgaagtaaaggaggtgatgcagttgcccgacttcaaagggtatttaagtgaccttggaggtccttccgccaatatgtatcagatgaagggtaaagatgaagcaatatgcaaaaagtgcaaacgcccgtcatgtattcatcccaaagtatgcccgaatcttaattcggaccatcgcccgttattggacatatacaaagcggtagatgccatccccggcataaaaaaatcatttatcggcagtggagtgcgctacgacttattgctccatcagagtaaagacgccgccaccaatcgcagcacggctgaatacacacgcgagttgattgtcaatcatgtgagcggacgattgaaagtagctccagagcataccagcgaccgggtgttatccatcatgcgcaaaccttcattcgaacagtttgaaactttcaaaaaaatatttgaccgtatcaaccgggaagagaatctgcgtcagcaacttataccgtactttatctcttcacaccccggctgcaaagaagaagacatggcggaactggctgttatcaccaaacggctggactttcatctggagcaagtacaggactttacccctactccgatgactgtagccaccgaagcatggtacagcggatttcatccctatacactggagcctgtattcagtgccaaaacacaacgggagaaactggcacaacgacaattcttcttctggtataagccggaagaacgaaagaatattctgaatgagttaagacgtatcggccgacaggatctgatagacaagttatacggaaagagaaacaaatgaaaccattaaaacggcttccctattgactttgccttttaaatttcgtatatttgtagaaacaaatccggaattaaaagcatgaaacgtacaaatataaagacataaagatataatttacatgtatgagagtacattgtaaggagtaagaatggggtgaagtccgcaaggatttcaccccattttgtttaattaattcctcacattccgaagaatttagcaaaatatagtttataataaacttgggacccgtttataataaacgtcctcactatttattataaacgtgatgcgagtttatgaagtaacttgtataagaaagagaaaacaaaaatcacagatgacagagaaaaggtatcagacgaaaatatattcatacatttataatgaacaatatacttttactaataccttcctgttctctttccaatcatgataaataaatcatggagcagccttttcagaaagaggtgtcgaattaaaatttatatcctttgtcggagtgatggtattggtagctaactcatagacgaaatatatagaaagagccggtgaatatacagcaaattttgtactcccagtctgattatagtaaagcctgaatgtgcaaatatcagtagcggaaatgaatggttcctttttcagatgtgaatggataggaaaaacaatcattggcatttgatccgtaacttctaccggaagaagaccggaatgaaatttcctccatgattggatttctccttctttatcagcaataaacaagtagtcattgccgaaaggtataacccctcctttggatgtcccagaaatagcatagaatttataaccatctttaaaaggaatgagaatccagtttaaaggaaagtctttgtagccataaatcggatattccttttcatcagcaaatgcactccgtattttttctctaactttaattaaatgcatttcatattcggacaggcctctatgagtcgtcacttccgaacaaggtgtcgtctcgttaaggaaggagacttcatatgtacattgagactggttatcaatcacaaggcatttaatcgtatctccctgttgataagtaagaataccttgtattgtttccatcagttccggtttaggcaaaaacatatcagtgaaattccaggcagccgtttcatatctgtacaaagtattagcttcttctacaatagaatcacatttctgttttagtccagcttccgtataactctcttgcgaatacaccgttaaccacgatgataataggacgatcaatgtcagcatgttttttcatattcattattttttagattttaaatggctcttacttgttcttatctgtgtctttagatcaaagataagcatttttgaatataaaaaacaaacattgctcttattatttatcaattaatgatcatcctgttctttcaccggcaacgctacaatctcctgcaacacactaacggcagtttccacattagtcacatcctttatcagcatactccgtcggccgttctgctcacgcaggtcacagcgccgggtatatttcatcatgtaatctatcattttgccaaacgcctgactctgatagaacggactatccgcattggagacaaagaatagcgtcatacgtccacccttcaagaagaccttctccactcccagtcgcgccgccaagcgacggaggggaacgatgcgaagcaattcctgcgtttccggcggaacaggtccgaagcggtcttccaggcggaaacggaaggcatctacgtctttatccaacgtcagcccgtccagttcgcggtaaagcaacatacgctcgctgctgcctgttacataagtggccggcaacagaagttcaagatcgctttctatctgacattcgtctacaaattcttctccactgatctgaccttctccctttatttcatctgcatacaattctgcaaactcatcattcctcagttcatgaacagcctcggcaagtatcttctgataggtttcgtaacccagatcggcaataaagccactctgctctgctccgagcagatttccggctccacgtatatccaaatcctgcatagcgatatggatgccactccccaaatcactgaagttctcaatcgcctgcaagcgtcgttttccttctgccgtcagactgctcaacggaggcgccagcagatagcagaaagcctttttgttactgcgtcctacccgtccacgcatctgatggaggtcactcagaccaaagttctgcgcttggttgatgatgatcgtattggcattcggaatatcgataccgctctctatgatagtagtcgccaaaagcacatcatagtcataattgacaaagtcaaaaatgatctgttccagttgtgtgggttccatctgtccatgcccgatggcaacacggcaatcgggaatatgacgttcgatcatcgctttcagttccggaaggttcgcaatccgattgttgacaaagaaaacctgaccgttgcggctcatctcaaaattaatcgcgtccgtaatcacttcctcattgaaggtatgtacttctgtctgaatcggatagcggttaggcggaggcgtagagattacactcaggtcgcgggctcccatcagcgagaactgaagcgtacgtggaatcggcgtggcagtcatggtcaatgtatccacattcacctttagctgtcgcagcttctccttcacagagactccgaatttctgctcttcatcaatgatcagcaagcctaaatctttaaacagaacatcttttcctaaaatacggtgggtgccgataagaatactgacttctccttccttcagtcctttcaatacggctttggactgagctgccgtacgggcacggctcaaatattctacccggcagggcagatccttcaaacgttcgcggaatgtctggaaatgctgataggcaagaacagtcgtcggcacaaggaccgccacctgtttattatcggctacggctttgaacgctgcacggattgctacttctgtctttccaaaacccacatctccgcacaccaaacgatccatcggacggtcgctttccatatcggccttcacctccatcgttgccttactttggtcgggcgtatcttcatagataaaggaggcttccagttcacgctgcaagaagctgtcagggctgtaagagaaacccttttcctgacggcgctgcgaatatagtttaatgaggtcgcgggcaatatctttaattttcgccttcgtacggtctttcagtttctcccaggcaccggtacccagtttattcagtcgcggagcttctccgtccttacctttatatttggaaactttatgaagggaatgaatggaaacgaacacgacatcctcattctgaaagacaagtttcagcacttcctgcgtagtatctccattcggaatgcgtaccaaaccggagaaacgaccgataccatgatccgtgtgaaccacataatctcccggagtaaactgattcaattctttgagggacagagcgaccttacccgaacgggccttgtcacttttcaagttgtacttatggaaacggtcgaacagctgatgatccgtaaaaatacacagatgcagcgtatgatccacaaagccttcatgtatcgtacgtactacaggagtaaactgaatcttatctccccggtcttcaaagatggctctgatacggtcggtctgcttagtgctgtcactacagatataaagtgaatatccctgttcaagatagtccttgaaagaaccggccaccagatcaaagttcttatgaaaaataggttgtacggaagtatggaaagagatctttgcatccggcgtaccagtcggtttattcccaaactccatccggcggaaatcgagggcacgtaccgtaaattcactgccatcaatcagcttgccctccagcgtgataccgccattttcttcggcttcctgtacggcaatagcctgtggcgtcaaagcctcatcgtgcactacctggatacgctcgcgcaaccaaaggaagtcacgcattgccaaaacggtttctttaggaatgaaatcaagaaaagaagttgtcacatctcccgtcactgccaggtcagggactatagccactccctctttcctctcacgggacaactgcgactctacttcaaatgtacggatactctctacttcgtcaccgaaaaagtcaatacgataaggatattccgaagcaaacgaaaagacatcaatgatactaccccgaacggcatattgtcccggctcgtacacataatccacatattcgaaaccatagctatgcagcacgtctgtgataaaagtagtgtccagcttctctcccacattcagtttcaaggtcttatcgctcaattccttgcgggataccactttctctgccagcgcatccggataggtaacgatgcacaaaccttcttctcctttctgcaaccggctcagtacttctgtacgcagaatctcgttggccgcatccttttgtccgtacttgatggaacggcggaatgaagacgggaagaacaacactttctctgttcccagcacttgtgtcaggtcatgataaaaatagcccgcctcttccagatcgcccagtacaaagacaaacggacacacatcttgtttcaccaatacagaagagaaaagagaagcggaagaagcacataagcccccgcaaaaaatagtttgaacggacgcatccttcagcagtcgttccatgactgctgtattaggatgagcggcatattgttgttgcaactcagttattgtcatagctataaaatttcaccgcaaaagtacgaaaaaagaaccgggattgatatagtcacaccgaagttttcttcttcaagattgtttcaagccttgaaactattggtttcaaacaatgaaactaaaagtttcaaggcatgaaaccaatagtttcacaccggggaacaaatacaaacgcgttaaattatccttagtccctctataactaaaggaaaagcgctacatttgtcataaaaataggacttctatgcaattatcagatagcatcgttattatcccgacctataatgaacgggagaacatagaaaatattatccgtgccgttttcggtttagacaaggtattccatatactggttatagaagacggatctccggacggcactgcaagcattgtgaaaactttgcaacaggaattccccgaacgcctctttatgatcgagcgcaaagggaagttaggattgggtactgcttacatcgcaggattcaagtgggcgttggagcacgcatacgaatatatcttcgagatggatgccgatttcagccataacccgaatgatctgccccgtttgtacgcagcttgtgcaaaagaaggaggagacgtatctgtcggctcccgttatgtaagcggcgtgaatgtagtcaactggccgatgggacgggtgctgatgtcttattttgcctccaagtacgtccgcttcattaccggtattccggtgcatgatacgactgccggatttgtatgctaccgccgtcaggttctggaaacaatcgatctggaccatgttcgcttcaaaggatatgcttttcagatcgagatgaagttcactgcttacaaatgcggattcaaaatcatagaagtccccgtcatcttcattaaccgtgagttgggaacttccaagatgaacagcagtatctttggagaagccatattcggagtgatcaagttaaaaataaatagttggttccataaattcccgcaaaagaaatgaaacgtatactgataaaaaacgccgtaattgtcaacgaaggaagaaaagttccgggatctgttgttattgaaggtgagaagattgctgagatcttagttgacggacaagaggctgccatgccttgtgacgaaacgattgacgcatccggctgttatcttttgccgggagctattgacgagcacgtacatttccgcgatccggggctgactcataaagcagatatcacaacggaaagccatgccgcggcagccggaggagttacctcgattatggatatgccgaacacaaatcctcagaccacaactttggaggcgctgaatgacaaactggctttgctggcggaaaaatcatctgtcaacttctcctgttatttcggagcgactaacaataattatccgttattcagtcagctggacaaaaaccgggtatgtggggtgaagttatttatgggttccagtacgggaaatatgctggtagaccggatggcaagtctgcgcaatatcttcggaggtacggatttactgattgcagcacactgtgaagatcagggaatcatcaaagagaatacggataaatataaaaaagaatacggtgacgatgtacctttgtcacttcatccggtcatccgctcggaagaggcttgctaccgttcttccgctttggcggtacaattggcacgcgagaccaatgcgcgtctgcatattatgcatatttctactgccagagaactgagtttattctccaaagcacctttggcagagaagcgtattactgccgaagcgtgtgtgtctcatctaatttttaccgaagaagattatcagaccttaggagcgcgcatcaaatgtaatcctgccatcaaaacggcagaagaccggaaggctttgcaggaggcagtcaacagcggtctgatcgacgctattgcgaccgaccatgctccgcacttactgagcgaaaaagaaggaggtgcattaaaagccatgtccggcatgccgaccatacaattctctttggttagtatgctcgaattggcagacaaaggcgctttcagcatcgaaaaggtagtagagaagatgtctcatgctcctgcacaaatgtatgagatacgtaatcgcggatttatccgaaaaggatatcaggcggatctggttttggttcgtcccgacagtgcgtggactgttaccacagactgcatcctgagcaaatgtaaatggagcccgctggaaggtcatactttccactggaaagtagaaaaaacatttgtgaacggtcatctgttatatgataacggaaccattgacgagaattatcgtggacaggagttaagattcagataaacagcaactcgtcacttataaacatatgattttatcttataagatacataacgtcgccccctacatcaattggatttactttttccatgcatggggattccaacctcgtttcgcagcgatcgccaacattcacggttgcgatgtctgccgtgcttcatggctgactacttttccggaagaagaccgcaacaaggcttccgaagctatgcaactgtttaaggaggccaaccggatgctggatttacttgacaaggattatgaagtgagaactatcttcaaactttgcaaagcaaactcggacggagataacctggtgattgaaaaagaaaccggtcaattcctagttttccctttgctccgccagcagacgcctaaacgggatggaagcccgttcctttgcctgagtgactttatccgccctctttcttctggcattccggatacaataggtgcctttgcttcttgcatagatgcagatatggaaggcctgtacgagcaggatccctacaaacatttactcgtccagactctttccgaccgtctggcagaagctgctacggaaaagatgcacgaatatgtacgcaaagaagcgtggggatacgccaaagatgaaagtctgtcaatgcccgatctgttggtcgagaaatatcaagggattcgccctgccgtaggctacccgtccctgcccgatcaatccatcaatttcctgttggacgaactgctggatatgaaacagataggcatcacactgaccgagaatggtgccatgtaccctcatgcttcggtctgcggtctgatgtttgcccatccggctgccgaatacttctctgtcggaaagataggagaagaccagctcgaagactatgcccgccgtcggggaaaaagtacggaggaaatgcgaaaattcctggctgccaatctgcaataactttcgtttacttgtgatttttctccttttcgcacgactaactaaccagaaaagtaacccatttaattcatgagagaacgaacaacagaggcaaccaaccctattgaacaggagttcttatcggtcatccgcgaatatgaacgggtgatctacaaggtatgttacttatataccaatcctaacgccccgctcaatgacctctatcaggatgtaatactcaacctctggaaagcctatcccaagttcagaagagaatgcaaaatgtccacatggatttaccgcatcgctctgaacacgtgtatcagctttttccgcaaagaaaagaatgtaccggaaatcgtcaccctcacccgcgaagcggactggatgatagaagaacatgacccgatccacgaaatgctgaggcaactttatcaaatgatcaatcagctgggacaactcgacaaatcaattatcctgctttatcttgaagacaaaagttacgaagatattgcggagatcaccggactgacggtgaccaatgtggctaccaaactgagccgtatcaaagacaaactaaaaaaaatgaaaaaggagtaatcatatatggaactggaagaactgaaaaaatcatggaatgccctggatgagcacttaaaagacaaggagctgatcaaagaggaagaacttggcaaactgataggacatgcagacaaaggtatccatgccattgcccggctgaatatcaaactaatcctgatttctttgccggtattggtcttattcctgctggaagtcctgttgcacggcagactgaatccgatctatatcattatcattctatcgtggattcccgcactctactgggacatcaccaccacccgttttctacaacagacgaaagtggacgaaatgcctctgatagaggtgatcagtcgtgtcaaccgcatccaccgatggatgattcgggaacgtctgattgctactgctttccttcttatactggcagtactctcatttatttattggcagatatggcaatatggaatagccatcattctgttttttatcctgctttggggagctgggctggggctgatcttgtggatttatcgcaagaaattcctgaaccgtattcaggaaatcaagaagaacctggacgaacttaaaatcatagacagttgaccagagtcagatgcttcgcctatttcaactaaaaatttaatatccgtgctgttatgttgcaacgcctatttatatttttacttattttccttattctaccagacatttatctgtatctcagatttatcgttcatctgacggcaaaacgctggctgagaatcctctactggctgcctgctttcctgttatccacaggattactttatctggtttacttctccaataacgcctttgccgaacgccatacacaggctattggatggttttccatctttttcttcctgtttacggctcctaaactattgctgtctctctgcacgattatcggggtacctttccacaaatggctacggtggccccgaactccctttatctgtaccgggctgacattagccgtgatttctatcgtaatgatcatctacgggtcttttatcggacgcacgcagtttgacgtcaaagaggtaacttattcctcgcccaagcttccatcggctttcgatggataccgtattgtccagttatcagatattcacatcggaagttggcagggaaatacttccgctattcagaagttagtaaaactggtgaatgagcaacaggccgatcttattgtctttaccggagatctggttaatcatcgtgcagtcgaactaaatgattttcaagatatactgtccggactgaaagccaaagatggagtctactccattttaggaaatcatgattacggcccttatttccgctggaaaagccagcaagagcaagacgataatctgaatgatctcctgcaaagacaagccgctatgggctggaagttattgaataattctcatacgattctgattcagggcagcgacagtatcgcccttattggagttgaaaacgaaggagaaccgcctttctcccaatatgctgacctccccgaagcgatgcggggaaccgaaggaatgttccagatacttttaagccataaccctacccactggagacgggaagtactcccacaaacagacatcgatttaatgctggcagggcatacccacgctatgcagttaaaattcgggaatcattctccttcctcttatatctatcccgaatggagcgggatgtatctggaagggacacgtggtttgtacgtaaatgaaggcatcggctatgtcggacttccttttcgcttcggtgcatggccggaaataacggtgcttaccctacgacggtaagcacgctttttccattgatcttcttatgtacctgcacctgaactgaaatacgttcactcatttcttgtacatgggaaatgactccgattttccgtccctgcatctgtagctgctccaaagcttccatggctgttctcaggctgtcagcatccaacgaaccgaatccttcgtcgataaacaaagattctactttcagattattgctcgaaagcgaagataagcccaatgcaagtgccagtgaaatcaagaaagattcacctcccgaaagcgaatataccgtacgtatctcgtcacacatatcgcaatcaatcacctgaagcgccagtgtatcgggaacttgctgtaacttataccgtttggaaagataagccagatgtttgttggcatgaagcaataacagatttaaagtataactttgggctatgactttaaatttagcaccgtcggcactaccaatcaatttattcaatttagcccaacgtacggcaactgcctgtttttcggtaagttctttggttatctgctcaaagattgttttattctttgcctgctgcaacagacgtgcctccgcagtcgacaacgtacgttccgtattaagattatcttcctgctgtttcgctatagcctgaggaagctgttccggaaattcaatacctttctgttgctcccgaagttcttcaatgacaacggacaattgtttcatttctccctgcaggccggaaagatggttttgtactccctccacttgtttacgagccttttccaacgcctcattcaattctttttctcttcgggcaacagcagcctcagcttcgtccgcactcttcccttttaataacaaagaacgttcctgtcggagtgcatccaacgctttagcgatcacttcgaatctttgttgctcatcaacagctgctttctgtaaaatagccgactgttctttagcggctgataccttttgcgcagccaaacgacactgtgagacattctcacgcagagcatcacagtgtgtccgcaatttctttattttctcatcgttctgctgccattccgcatacagatgctgataagctgaaatacgttccgccaactcatttaaccgattctgtatatgttcttcctctccagccggcaatccttcttgttgtaaaacggacaactgttcttttatctgtacctcagttgccctttgatgggttaaatctcgttgcaggacaatgctgcgattatttatctgctgataagcagacactgcggtattatattcctgttccatattccggtaaagagtatccactacctcttgttcccgatgataaggatgtgtcgtacttccacaaaccggacaggcctccccttcctgcaactgctgacgcaatgctttcacatcctttcctaccgccatacgggcattttcataaagccgctgcaaagctttaactacagcatcctgctctgccaactgctgtgtacaagcagtcacttccttttccagtttctctatatcctgcttcgacttcgattgttcttcagtcaatttctttatattctgcaagcgcgtcagttctttttgaatttgaccctgctcatctaccaaagaaggataaccaaaagagtttaaccggccaaggcgttcttcattcacctttgtccatgtttccaatgtatccttttcctcattaaggatgacttcaatctgttccagctgcagtgactccacatccgtacgattcaacagacgactcaaagaatgataggaaatccgtaactgctctactgcagatgcagatttcttatcctgatccgccacctgctgacgggcagcctgcaaaatttgttgcgactgtatataccccgcctgctgcgactgtatttgtacatccagctgacgtgcctttttcagatccggctgtatcgcttcccactgcgctttaaaatgaatcagtccttcttcctgaacaaccaaagcatcctgtagattcttttgtttattcagttcctcctgctcttcctgctgctttttcatccaaagagcttcctgaattttcaatgaacgaaccacattcaattgcgcattcagttctgccagcaatttaatccctgccgcacgtttctcaaccaactgttctttctcattttgcaaggttaaaagttcttcctccggcaacaactcaatcacactcatcttactttgaatcattgccacctcttcttgtgcagccttattccgggcaaaaatctcctgggagatgcgggaataaactcctgttcccgtcaatttctccagtagttccgctttcgctgcccctctggatttcaaaaaagttgcaaagtcgttttgtgccagcaatacggtacgggtaaattgctcatacgtcaaaccgaccaactctaccaactgtgccagcaattctttcttcgttccctgaaattctttttccgtatccaagtctttcacctccaatacttggggctgcaaagaaccactcgccttattccttgtccgtctgaccgaccaccgggaacgatatcgatgtccgtccactccttgaaaatcgacctccgcatatccgtcactcgtcccccgacgaagcagatttctcacatctgactgattgatctggttatctcccacatctgccagattgatactctccaccgaagccgcaaaacggggagccttgtcatataatgccagacacagagcatccaacaaagtcgactttcccgctcctgtagcaccggaaattgcaaatataccagccgaagataacggttccaccgtaaaatctatttcaacactgccttctatcgaagtcagattcttcaatcttattgctataattttcattctccctcctcctcttctttacgagttgcggaaatatatgcttcctggaataaatcagtcaggtcggcaggcatttccgcctgataaaccttttcgaatgcagattgcgcaatctgcaacggagacatttcctgcaatccctttttccagccatcaacctccttttccactctttcttcctgacgataagcagaaacgatacgtgccagacgatatttcgtaccagccaatgcctcttctatttcctgacgaagcataggttccggttcttcaagcaaaaccttgacttccagataaggagcttctccatccacctccggtaaatctcttaatatttctattattttttccggtgaagcagcctctccacccggcacactgataagaggtatggattgtggacactctatccttctgatatcaaccgcacagccttcatctaaagtcaccatcaccactccatgatgataatgcttctcggcaaaagacataggaatcggacttccggcatatcttacattctccctgccggatactcgctgtgctttatggatatgccctaaagccgtatacgctatcttttccgaaaatgtatcgggtgatacacattccaaaccaccaatcactgtccgttcgctataatccttctcggcaatctctgatccagtagcctgtaaatgaccgacagcaagaatagcctgattcgttttccggcgtgcccacaacctttgtaaaagtcgcgcgtaaagttcgcgaactccttccatatatgggttcccttctgtctccactaccggataatctccctgccgcaaaaaaggaacagccatacaaagtacttctgcttccccttcgcgattcttcaattctattgtcaaatgatcatagtcaatctctccgccctccaatttgcgcactacccctctgacttccgtccgcatcgcctgcaacaaaggcagaggagcttccaaacgcgccgcagagtcatgattaccggcaacaatcacaatttgaagtctcggattctccgcagtcacccgataaataaactcataatatatgcgctgagacgcagcagaaggattggaaacatcaaacacgtctccagctataactaatgcatcaatctcgttctgtcggatttcttcggccagccaatcaagaaaagccttatgttctcccgtgcggtcgtaaccaaaaaatgtctgtcctaaatgccaatcggcagtatgtagtatacgtatcatatcattatctgtctataacagatgacaaaaatagcataatcgcaaagattatgttgtatcctactgctttttttaccaataatcatgtatctttgcatatatataaaaataaattccccatgaagatactatattatatttatcaaatttgtattgctttacctatcctattggtattgactattcttacagcgattgtcaccattgtaggctctttactaggaggagctcatttctggggatactatccgggcaaaatatggtcacaactcatctgtctttttctgttgattcctgtaaagattcacggtcgtgaaaaattacacgggaagacctcttatatctttgtgccgaatcatcaggggtccttcgatatttttcttatttatggattcatcggaagaaatttcaagtggatgatgaagaaaagtctgcgtaagataccatttgtaggaaaagcatgtgaaagtgcaggacacatttttgtagaccggtccggtcccaaaaaagtactggagaccattcggcaagcaaaagattcgctgaaagacggggtatccttagtcgtttttcccgaaggggcacgtactttcactggacacatgggatatttcaaaaaaggggcgtttcaattggcagatgacttgcagctggcagttgttcccgtcacaatcgacggttcttttgaaattctgccacgtacaggcaaatggatacatcgccatcgcatgattctgaccattcatgaccctattcctcctaaaggaaaaggtatggaaaacataaaagctactatggcagaggcttatgctgctgttgagagtgcacttcctgaaaagcataaaggaatggtcacaaacgaagaccaggatcgataaaaacgaaatgcggggatactcacgcacccccgcatacctaaccagtctttatgcattaatctattaaatcaaaaagtctatatattatgtagaaatcttattgtctggttagacatcatttgcaattcctggaatgtcaaagcaaatcctctccttatttcttcttctaatcgttctaaagagaagtactctgcttttattccattgattttgcctctaaaataattattgtattgttcatgcaatgtatctggagtaactaaacctccaaaaccatattcccccactacaataaccggttttcgttgtaataccccttcataggccataccccttgcgccaatgataagcccagcctcatttacagcttcacttatctcctcgtcagaaaagatatatctcacctgatactcttgtattgtatctaatagaatacttactctcaattttgcacggggacaatcaatcccgactgcaatagaagaattatattctatagattgctgtttgtcaccttcccaagtgccaatagcaactgtatgatgactattcattatataaaagttaaggtctagttccttatttattctattactagttctccgtatacgtatccgccttcggctactttaaattctagtttataaacgcccggagcccatccttctatagagaaagaagttgtttgtccaggagccgttacctgacagacttcctgtacttgtccatctactagtattttcacttcgcccaaaggagctgtaaaaatgatttctacaatattatcatctgtagaaacagacgcattaataggtattacaggaatagaacgatgagtagtagttgggacttctccctttaacacaacaggcaattttctctctacccgatccgtactctcaatagcaatcatatttcctgcaataaataatgcagctaaaaaagataaaataaaacgtactttcataactatattgcttttttgtttcgccaaaagtacggtatgtattcgaaaaaacaaaaaaatcgacccggacaaattacaagagaaaacaatcaaataactatctattaatcaaaacattaagaagatatcatttaacatttacccggacaatccattttttatttctcagaattctttcaaaaaagtgtctaaatcatcttgtggagaaacacctaatcgaccttttaaccgaccttttgccctagttacagaatcagaagtagtatgaaaaatgcaactcaactcttcatgagtcaaaccgaatttaagaaaacagcaaatctcaagatcatgttttgttaaggttggagctctttccaacagcctagtaacataattccaatacatcagatcaaatagactgaatagtttttgcctctcttcatttgatagtttacctcttaatgtaccttcttttatagctaataaaagccgaaaagcatggataaatgagctagaagatgttccaacatttaattcacctcccaattctttcaaatgttccgacaatgttttattctgcattgttaatagtataatcttcccattaagttctcctacttttgtgcggttttcttctaacatcaaattctcctttaatacttgatcttttgatatttgaatatcttcaatttcctgttgatatcgttctatctcttcttcattctctcgaatctgcgattcaatctcagctattttctttttattattccggtttttataataataatagcacatacaagcaacaacaatcaagaaagcaatcatcccccataacataaaattcgtatatcgtaccttcatatgtaaattgtcattctgtagtttttcattctcatatttcttctgtagacttgctattaattctcgagaattaagttcttccatagcattagttatggaatcggctaattcatggtagactattgcctcctcaaaattatcaatatctttttctagaaaatacaaacaatcaaatgcactaatttgcgtatatgccttagaagatttagcactcatctttaaatattttctagcattttcggtctgtcccatttgcatatacaaatatcccaaagacaagcattccatatattttttctcttcatcagtttctttttcataagcagctaaaaaataacgttctgcttccgataattcttgcatagaacgatataaaatacccaattcatgcaaaattgaaatttcagacaaattcttttttacggctatttccaaagcattattgtaataataagaacagctatcccattgagatttaaacaaataaactctagcaatattttgactaacactaataatcccaagagaatccttcagccgtatatgggtatccaatgcttctcgaaaataggataaagcatcatcaaatagctcctgccttcggttaatcatgcctatttcttcaagaatcaatgccaacattttatgatccttagttctctcataaacatcttttgccgcaagaaaagatttcaaggcttcttcctccttatccaattcaagcataactcttccatgataaaatagagcctttgcatacattattggggaggtctgagttattgtatagtaattcagagctaatgcaatcaacgaatccgaactaaacttcatatagttcttatccattgcctgcgtcatcagaagagcataagtcgcttgtgactcaccccacaatttttcaggatcatgaataccttttaataggtttagagcactatccggacatagatccatacacttttccacttttgaaaaagtcatgttgagagcgtccgtatctctatgacaggaaactgccaaaaaagaaagaataaagaaaaaagcaatacgaatagaaaaggacgttttcatcttatcttgagttttatgcaaaaatacgcaaaaaactcaagatttatttcttcgaacctacattttgttgcatccgttgatgctcttctatcaattgcatgttctctttggccttcgtcaagaactctcgcaccatcttattactcttaaaagaatagggagcatcctttattatatcatctatttgtggagtcataataggatatggcaaagagctgcaaagcattataaatacattaggtcctaatacattttcataattatccgagatgaaagtcttgacatattgattcatcgctttcatcagtgaatctccttctgcaagtaactgttcatgaacttcttccagatcagcgccatccatcaccatacgggtttcttttctttccagttcaccgatgctttcttccattgcattcttctttgcaataaagtcatacaatgctgtgttcaaaggagttccaaccgctttaaggtcggtattgctaatggtaataacgatcttgccactttccaacacaaccggcatgacactttcgtcatccatataaagtgttgtcatttgtacagaatcgattttccctttcattgaaaatgatccatgcactacttcagccgagtccagttttgtccattctccatccctcaaagtcttcagatataacatttttccatccagaccatttactgaagatgttccttctatcttatacttatgagtacacgaagctagaaagggaagcaaaagcacaaaaggcaaaatcttattcacgttcattgtttcattaaattctgggtacaaaggtacaactgattcggacttaaaagaaacattttatcaatatttaaaacttgtaagactcttttctttaataatccttataaacagaggtgggagatcatttttttcatttagtttatctaaatttgcagtcatgaaagcaacaacttatgcaccttttgccaaaccgctttatgtcatggtaaagcccgtgggagccgtatgcaacctcgcatgcgaatactgctattatttggaaaaggcgaatctatacaaagaaaacccgaaacatgtaatgagcgatgagctactggaaaagtttatcgacgagtatatcaactctcaaaccatgcctcaagtgctttttacctggcacggtggagaaacgctgatgcgtccgctttctttttataaaaaggcgatggagctgcaaaagaaatacgcccgcggacgtacgattgacaattgtatccagacgaatggaaccttgcttacagacgaatggtgcgagttcttccgtgaaaacaactggctggtaggggtttccattgatggcccgcaagagtttcatgacgaatatcgcaaaaataagatgggcaaaccttctttcgtcaaagtgatgcaagggatcaatctcctgaaaaaacatggagtagaatggaacgctatggctgttgtgaacgatttcaatgccgaatatccattagacttttataatttcttcaaagaaatagattgccattatattcagttcgctccgattgttgaacgcattgtttcacatcaggacggtcgtcatcttgcctctctggcagaaggtaaagaaggggcattggctgatttttccgtaagtccggaacaatggggtaactttctctgtacaatttttgatgaatgggtaaaagaagatgtgggcaaattcttcatacagatattcgattccacattggctaactggatgggcgagcaaccgggcgtatgtacaatggcgaagcattgcggacatgccggcgttatggaattcaacggagacgtatactcttgtgaccacttcgtattcccggaatataaattgggaaatatctatagccagactttggtggaaatgatgcatagtgaacgacagcataacttcggaacaatgaaataccaatcactcccaacccaatgcaaggaatgcgactttctatttgcctgcaacggagaatgtccaaagaaccgcttcagtcggacagcggacggcgaacccggtctgaactatctgtgcaaaggatattaccaatactttcagcatgtagctccctatatggatttcatgaaaaaagaattaatgaatcaacaggctcctgccaacatcatgaaagcactaaaagacggaagtttaaaaatagaatattaacatcataatttataattgttatcataaagtaatgaacagactaagactttatttattagcgctgacagcgctgctggtatgtaccgtaaaagcggacgaaggtatgtggttattgcaactaatgcaacagcaacattccatagatatgatgaagaaacaaggattaaaactggaagcccaggatttatataatcccaatggtgtctctttgaaagatgcagtcggtatattcggaggaggatgtacaggagaaatcatttcaccggaaggcttgatcctgactaaccatcactgcggttattcttctatccagcaacacagtagtgtagaacacgattatctgacagatggcttttgggctacatccagagatcaggaacttcctactccgggactaaagttcaccttcatcgaacgtatcgaagatataacagatattgtgaatgctaaaatcgccgccaaagagattacagaatcccagtcattcaccggtgctttccttgaaggactggctaaagaactctatgaaaaaagtgacctgaaagataagaaaggaattgtaccgcaagcccttcctttctacgcaggaaacaaattctacctgttctacaagaaaatatatccggatgtacgtatggttgccgctcctccttcttcagtaggtaaattcggtggcgaaacagacaactggatgtggccccgtcataccggtgacttctccatgttccgtatctatgcagatgccaacggagagccggctgaatacagcgcaagcaatactccgctgaaaacgaagaaacatctgtcaatctccatcaaaggtttaaaagaaggagactatgcaatgatcatgggattccccggaagaaccagccgttatctgactgtgtcagaagtaaaagaacgcatggagtcaaccaatgaaccgcgtatccgcattcgtggtgcacgcctggctgttttgaaagaagtgatgaacgccagcgataaaatccgtattcagtatgcaaacaaatatgcaggctccagtaactactggaaaaactcgatcggaatgaacaaagcgatcattgacaatgacgtattgggcactaaagcagaacaggaagctaaatttgctgaatatgcaaaggcacaaaacaataccgaatatgccaatgttgtgaaaaagatcgatgatctggtagcacaaacagctcctctcaattatcaactgacttgcctgactgaagttttcttcggagctatcgaatttggtaactcaatgttaactaaaacacgggaagctttggttgataaaaacgactctctgatcaaagttcgtctggaaggtctgaaagaaaacttcaaaagcatccataacaaagactatgatcatgaagtagaccgcaaagtagctaaagtactgcttcctctctatgcagaaatgattccggcaaaccaacgccctgctatctataaagtgatcgagcaaaaatataaaggagattacaacaagttcgtagacgatatgtacgataagtctatttttgccaatcaggctaactttgataaattcctcaaaaagccgacagtaaaagctattgatgaggatctggctttgcaatatgctcaatccaaatacgatcaatacggcaatctccttgatcagctaaaagagctggacaaagaacttgctctgctccacaaaacttacatccgcggtttaggtgaaatgaaattacctgttccttcatatccggacgcaaactttaccattcgtctgacctatggtaacgtaaaaccatatgatccgaaagatggcgtacactataactattacacaacaacaaaaggtattcttgaaaaagaaaatccggaagaccgcgaatttgtggtaccagccaagttgaaagaacttatagaaaagaaagactacggtcgttatacattacctaacggtgatatgcctgtctgcttcctatcaaccaatgacattaccggtggtaactccggcagtccggtattgaacgaaaacggagaattgatcggctgtgcattcgatggcaactgggaatctctgagtggtgatattaactttgataacaacctgcaacgttgtattaatcttgatatccgctacgtcctgtttatccttgagaaattaggaaactgcggccatctgattaatgaaatgactatcgtagaataaatgagaaaacaaattatatttgctattttttcactggcaactcttagcatccacgccgatgaaggtatgtggatgctaactgacctgaaagcacaaaatgcagttgccatgcgggaactcggcctggagattcctgttgaagaagtatataatgccaatggcatttctctgaaagatgctgttgtacacttcggtggcggatgtaccggagaagtcatttcttccgaaggactggtactcaccaaccatcattgtggttacggagccattcagcaacatagtaacgtagagcatgattacctgacagaaggattttgggccatgaaccgtgatgcagaacttcccacaccgggattgaccgtcacttttatcgaccgtatccttgatgtaaccagttacgtaaacgatcagttgaaaaaagatgaagatccgaacggtactaattatttgtcgccaagctacctgagcaaagtggcagaacgcttcgctaaagatgaaaatatagaagtcacccctgcaaccaaacttgaacttaaagctttttacggaggaaataaatattatatgtttgtaaagaccgtatacagcgatattcgtatggtaggtgctcccccctcttctattggtaaattcggagccgacacagacaactggatgtggccccgccataccggagatttttccctcttccgcatctatgctgataaaaacggcaaacctgccgcatattctagagacaatgttcctttgcaggtaaaaaaacatttgaaaatcagcattgccggagtacaggaaggtgacttcacctttgttatgggattcccgggacgtaactggagatatatgatttccgatgaagtggaagaacgtatgcagactactaactttatgcgtcaacatgtacgtggtgcccgtcagaaagttctgatggagcagatgctgaaagatcctgccgtacgaatccattatgcaagtaagtatgcatcttcagccaattactggaaaaatgcaattggtatgaacgaaggattagtacgtctcaaagtactggataccaaacgtaagcaacaagaagaactcttggcccgtggccgcgaaaaaggtgatgattcttatcagaaggcatttgatgaaatacgttctatcgttgctcatcgacgggatgcactctatcaccaacaagcccttaacgaagcacttgtcacagcacttgactttatgcgcctcccttctacgactgaaatggtcactgcccttaagtcaaaagacaaagaacaaataaaaacagctaccgaaaacctgaaacaagccggtgaaaaatactttgcctccgttcccttcccggaagtagagcgaatggttgccaaaaccatgctgcaaacttatgccaattacattccggaggaacaacgaatcaatattttcgagatcataaactcacgtttcaaaggaaatatagattcatttgtagatgcttgttttgaatattcgatttttggtaatcccaaaaactttgaaaagtttattaaaaagccaagcttatataagataggtcatgactggatggtacttttcaaatactccatcacagatggaatattgaaaactgccattgccatgaaagaggccaatcagaactacgacgctactcataaggtatgggtaaaaggaatgatggacatgagacaggaaaaaggaatgcctatctatccggacgccaactcaaccttacgactgacttacggacaggtacttccttacgaacctgccgacggagtagtttatgatgctcatactacactcaaaggagttatggagaaagaagatcctggaaactgggaatttgtagttccgcagaagttgaaggaactatataaagccagagactatggacgctatggtaaagacggtgaaatgcctgtctgctttattgttaatactgataatacaggaggaaactccggcagtccggtattcaatagcaaaggacaactagtgggcacagctttcgaccgcaactatgaaggtctgaccggagacatcgctttccgcccctcctcacaacgtgccgcctgtgtagatatccgctataccttatttattatcgataaatatgcaggagcctcccacattattgatgaactgagtattgaataaatggataatgaaaaatggataatggaaagtccctatgtagggtgacatttccattatccattttccattaaataaactcttctaccatatacatctcatctatcatttcattcattgtttcctgcaaattcaacacagcttcttcaggagactctccgtaagcattacattgcatattcacagtcaaccaggcataatatccgccatctgacgcccgctcaagtacataatctgttttattcagtttcatatcggtaaataattagtaaatgttggtattgaagtaattgctgattgtggagcagccagtttttccagttccagaataatacgtcgttcaccactacgtacccaacgaacgaatgtacgattaggagaatacgttccggcaaaacggagtaaaggcttcaaatcaaaagaatcactaataatccctgctcctgccctcattgcatcatgggcattacaatcctgctcaatatgtgccggaaccatcaatacaggttttcccagatacattgcttcacagatagattcgaacccagcagtggtagcataagcacgacaaccggccatcccattaagaaacttcacatcatctatctgatagaaacttagtgtttcgtcaatcctggtcacctcatctgcatctgctttgtcccagaaaaacctcaaaggaacttccggatatatcgtatgaaactcctccacactatctgcaaaaccggaatttaccatatatccatgaatataatttccttcttccggttgaatagcagttacttcctgccgaattaaaggaggaactaccaccacttgttctaccctgtccggttccatatcattgaaagataaagcaagtttcttcgaagatcttacagctgtcatcttggtgaagaaacgcagcatccgtaattgaaaagagtttttatccggaaattcaaaattctgatgtaaaaacaagtattggtgtccgacgcagacatatggaacggagggacgaaagagtgtgtaggtaagtcctgtcaaaagctcgtagaagttgatcactacttccgcccctgtatccttaatccgctggttaatatagcacatactgcgaaaatattccggaatacgcagtaaattataaataaaacttttctttagattcgctcgtttattatctgccgcaggcaagaaattaggactgataaaacgtttgaccggtgcctgtatattccggttaaaaaatccgggcaagatacgtgatgaactctcaccgactaatacttccactacttcatgtccattacgcaacaacatttcttcaagggtaatagcttgtgtcaagtgtcccctaccctcgccttgtacaataaataaaaatttcatgaggctatcattattagtttatttcttatttatttgtttttcgttatgcaaagttcccttttctagattacaataagatgactctacaattactattttatgaacaaaaacagctttttcccgttatattaataaaatagaaattatatttgcagtcttcaaagactgatatttaaatttaagaaaggaaagattatggaaaagtttgaagatttaatacagtcaccgatacccgttttagttgatttctttgcagaatggtgtggaccctgcaaagcaatgaaacccgttttagaagaattgaaaacaatggtaggagataaagcccgtattgtgaagatagatgttgaccaacatgaagatttggctactaaatatcgcatacaggcagtgccgacttttattttattcaaaaatggagaagccgtatggagacattccggagttatccacagtagtgaattaaaaggaatcatcgaacaaaattacatataaaaggaaaatagcgaatgaagaaagtattagcaatggtagcttttgtcatgctgagcgttatcgtatacgccttcaatgacaaaccggatgccaatcaaggtaaaaaagaggtaacaggtaacggtgaagtcgtcgtaatggacaaagaaatgtttctgaaagacgtcttcgattatgaaaaatcaaaagagtggaaatacaaaggtgacaaacctgccatcatcgacttatatgcagactggtgtggtccttgtcgccagacagccccaatcatgaaagaattggcaaaggaatatgcagggaaaataacaatctacaaagtcaatgtagacaaacagaaagaacttgctgccttgtttaacgcaacaagcattccattgtttgtattcattcctatgaaaggagatccgcagcttttccgtggagcggctgacaaagcaacttacaagaaagctatcgatgaatttctactgaaataaagagccctaattatagtgacactatccggtcaggataatgacattataatataaaaatggtgacactatccggtgtggatagtgtcaccatttttatatgcagaataaagatcatttaaagtatcccacgggatgattcatcataggaatctgactatctttcagtttcaatactttcttcagctgagcggcatccatcgaagcacgtggcactgtagccagtttagccgcagaacagaaaatagaaatattctgagaaacaataccggcatccatggctcccattagttgattctgtatcttctgagcatcaccaaaacgggaaacatcactgattaatactaaagataccggagccgtttttacaaaagcctggccacccgctaccgctccacggtaatctccttcagcaatcagatttaactgatgattctttgcgtcatacaagtaacttccttccgataatatcacatatacgtctacatcctgcttattcatagcggaaggagccgttcgttttccagcatccgaacgattgattccgttggccgcccataataagtctgacaaatcagcaagagttaacgctttcgaagcatactcacgcgtagattgacgttcagacaatgccttcatcaccgtaccagtacgatttaaattaggttttggtaacttaacaaccttatcagcagcaaaagcagccgctgaaagcattaaacaaacgaacaatagttgtacctttctcataattgtggtatttataaagttgataggcaaatataaacaaaaaaggtctgcattcactatagaacacaaaccttttaaaagttatttataaggctttattatttcttatctccgaaataacggttgtaaagtccttcaaaacctttaccatgacgagcttcgtccttgcacatttcgtgtacagtatcgtgaatagcgtccagattcaaagctttagcacgagtagcgatacgttttttgtcttcgcatgcaccttgttcagcatctttacgcttttgcaggttagtttttgtatcccaaacacagtcacccaacaattctgcaaatttagaagcatgttcagcttcttcccaagcatagcgtttgaaagcttcagctacttcaggataaccttcacggtcagcctgacggctcatagccaaatacatacctacttcagtacattcacccataaagtgattattcagatccttgatcatttcttcgtcacaaccttttgcaacaccaatcacgtgttcgtcagcaaaagacaatgcaccaccttctacttcaacaacttctacgaatttgctggcaggagctttacacaaaggacatttctcaggagctgcgtcaccttcataaacgtaaccgcatacagtacatctaaattttttcattttcttctcaattttaaattaattagtcaatacgtgtttctttatcttttcttaagcaattcttgcatatacctttataataataatgaacttccgtcacttgatgcccatccatttccagactttcaactttcttcacggcttccggagattttaagtcgtaaatatgtccgcaatacctgcataagaaatgagagtgaacagaagtatccgcatcaaaatttgtattcttctcatcaatcgtgagcatcaatgcagctccctgttccgaaaacaatctcaaagtgttgtataccgtcgttttcgaaagtgtcggcatagaaggagataacgctgtatagatatcatcagccgaaggatgaatgggatgattcatcaaatattccatgatcgctatgcgctgcatggaaggctttatattatgctctaacaatcgttcgtatggtttcataagttctccctcttttcaaagttgtattcattacaattataaatctgatgcaaatatagaaagtcccaatatcatttccaaataaaatcaatattttttttgcagatatgtattactaaattcttccatacaaaaaaggccatcttaataaagatgacctttagacattgatatacctctattttgccttaattcttgttggttttagcctcttcgattattgattcaggtactttttcgcaacggacatatttattcacgtcactatcatcatcttttacagtccaaatcatggaaccggattctagcaaatccgttacgatatagtcattgttccagtcaccattaccaaaatcatattcaccactaataacatatcccagataaggatcgttttctatattaaaagaaccagtaatataacgtgcatacatactgtcaaacttctgatacatttcaaaagtcagttctctacgattaaaagttatatagcaatatgtaccttctgccagagcttgtccgttccattcagaaagttgccacgttccgtttaaattagcagcagtgaccggcaaggcaggaatctctaccttttcatcgtcgtcacaggatgcgaaacaaagcacgaaggcgaataaagccattaatttgaaaatattcttcatgtcttctttttatttttattgttacttaatacagtttacttttatattcaatgttcggtctgacggttgcccttccactccctctataataataggaaaagtaaatgaacgacctttttccacaggaatcagtgaggcgtctattgtaatcacaacgtcggcttcactacccggactgattacttccggctcggtacgaaaagttgcaaactcaggaataacagcagccgacaaacgcaatgattggtttccgctgttaccacacaggattcgttcggaaggacgctttcccgcatttacctcccggaattctatccggttttgtttcagtctcaatttacccatcttatatggataacgtccccattcatccgctcccggcaacacattacctattaatgtaaggcgtgccacaggcattttgtccgaagaagacagataaacaaaagcattcgtgtctatcgttccgggatgattcttcggatgataagtcaatactacaactctcgtttcaccgggagatatctcccctgtacgtacatctgctaccgcacatccacaagtagttcttacacgggtaagatttatggctttgccacttacattagtacatgtgaaacgatacatttttggagcatcatcttcggttaatgtcccgatattcagcacagtcttgtcaaaacgcagaatatgttccgctccttttatcaacggcggatttatcagcgtatctgttttttcctgtggagtgaaatggacattccgggcttcaaccgcccggaattgtccgatgactacacataataaaaagaatcgtatccaagtaactggtttcattgaatattaaaattacatccaaccattatcattagccttcttgcgaacggtaacagtaatggattgttcgcttccattgcttactttcactgtaatacgggttgcaccggtttttaccccggatactgtcataaacgtaccattgacagatactgaagcgacagttgtatcacccgatgtgcaggtataagttagattctctccattaacaaaatagcaggcaaggtttaaagtcgatgctgcaccttctgctacatacatattgggtactaccatatcagaaccattaccctcaatattgttaagcaacattccggcatccagcaaacctgctcccatcttgcccacatatttcgataactctactctagtagcggaagctccggatgagatgtggttacgatagtaagccttcacttctcctgtattataccagctatcgagtggttttgtagatgatttcaatagttcgacaaactcacttgctttaaaatgacgacgttgtttgacagcatacgacaaccccaatgctgcaactcctgatacatgcggacaagccatagatgtaccatccataaatccataggtcgcattaccgttttgtatccaagtcgagagaatagaaccggaatggattccttcttcccaaccttcagggtcatcttgccccaccggattgtaatattccgtatcaccacctggagcagatatcgtgacttcctttccatagttgctatatgaggccggagtaaaatcggccgctaccgcactgacagatatacatttggaataagcagcaggaaatgcagccattcccgcatattcgtttccggaagcgaaaattgccagtccaccgtctatcaccccattgggcgaaccggcattattgataaagtagtccaatgcatctttttccaacggatacaatttttcccattcttcttccgatcccggaccgggagtatatccttcaatcagattggccaaggaagagttgtatccccagctacactgaagaatgactgcgccattatcagccgcatattttatagcccttgcttcagcatccaaggtaacaccggcttcacccgcaaacacttgacatgacataattttcactccggagtttttggaaccatcgccaccggcaataccgcaaacaccttcgccattattattcatagcagcaatagtacctgcaacgtgcgtcccgtgtcccgtgtcaactgcatccatccacgaaatgattcctgaattgctcacgaaattgtagccatatttatcgtccttatatccgttaccgtcagcatccttatctgcataaagttcttccttttcattgatccacatattacctttcaaatcaggatgggtatacatcacaccttcatccagcacagcaacaatgatagaaggatcgcccgtacacttcttccatgcttccatacaaccgacatcacaccccggcctggaaccatttttcaatacgttctgattgtcaaaagggttattgccactgttattataatgccattgatatgccaatccgggatcggagaaggtgcttcctgtcgtaacagtacgtgttgccgccttctgtcgcaatgcactctcactaacataactccgatagccatcaactctgtaagcacgctgaatgtgactgttagcctgtactttagctacttcgcctaatttagcaagacgaccggcggcttccttcaagtctgtattttcatcaaactttacccgataccacaaatgtaatcctgaagtacgggtacgttcttcatttttagtgtctaccggaaatatacgttcaaaatgatatgtacccagaatatccaacacttcgtcagtagaaggaatcccggaacgggtcatagcccccccacttcttgttgcaactgtgagagcctgatcaagaatctctgtcattgcaggatcgaatttaatcagcaattcaccggaagtgacatcagccggaagctgaacttccgtcccccctgttggggtagacggttgttcgatcacttcttgttccgagcatgaagccagcatcaaggcaaacagtgctgtatataagaaatttttcttcattgttcttatttaaaattattcttgttaatgatatttactctatagccctgctagtctgtagttcccgacaatacaaattttctaaaatacaacggataagcgacaccgctaacaatttgatttgtcccggggtctgtacttccgtaataataagaaaaatcgtagtttacgatatccacattattgaatcccactgtatttccttttgagtttctgccgtcttcttgctgattgaatatcatgctttcgggtccccaatatacaaagtaaggatggaatagcaaccaattaggcaaagcacctgtcaggaagttcaaattaatatgaactgtacgggcaaacggtaacacacgcggaatatcctgcccgcttactggagtctgcttccgatatcttacctgattgtcggtcgtcaacagccactggcaagtatctctagatatcttatccatgaatatggatggcttggcagtcaactcatctttactgaagaaatcatccgattgataagtttccggtttatctgcagctctcaatgccgctctcacctctgcgtctgtaggtaattctccctccaagaagttgtatgacatttgcaatgaaatcagtttatcccaagtcaataacttcaagaaagcttctctttcaggttgtccttgagaaatatcaacatgcagaccgacatccctaccattgtattggttgttcccatcaatcaagctcatatctttcagtgtttccgtagcacgacatccggttaatgtcaaatatctcaagtgcgggaaattcttttcgttcaccacatctgtaactacagacaacgactggaaattattacttgccaaatccaaattctccagtttcttacccaatttaataaaattctcagggagagcatttataccaaaagagaatattgtcagatccttcagatactccaattcgcaaatttcttctcctaaagaaatagtacgtatttgtcggttggcattactctgaactgaaaatgattccaggtatttcagatgacgaatttctttggggaatgtttcaccgtcttgcaaatcaatcattgcataacttacagacctcacacgccctacagcttcagtaggaactattccatcttttatttctttatcagtagcttcccaaagggttacaaaactccagttcatcatactttcactggtatcaaaactcatcatgctctggagtttgctattgatagtaataatagccaatgagtcaccggcacgattatcctcaatcttcatagctgctttttgtgttacagtcaacactacagcatctattttattaccgttattgtccaccaattggtcattctcatctactggaaccagatggatctttgccacacgggtatagggagccacattcattccccaacggaaatccactttaagagtacggggacgtgctcctttgtctaaattcaccgctagatctttatccttcggcaatgtcacccaaccgctacgttctccttctacctctcttttctcctcttcagtcatcgtagcctcttctgcgaaagaataatccacacttccgattttgaaatttacgttagtagagataattgatttaaagtgacggttatcgaatgcatccgaactggggatttccacttcaggttctttcaccaagatttgcttaccgaaaccgaactgtgtaaccgtaaccaagctaggctcacgaccattcattgtgaaacttatctgtgctgtacgcgcaacattcgtcagtgtagagtctatggtaagttcacataccgctgaaccaaaaccgtttgccggtgaaacggcaatccaaggtttagaaacgcgtaccacccattgatcattagatgaaacggcgatcttctctgttcctccttctgcaccgatagctatttcttctttatctaccgaaatgccatcgatccttgtttcgtcgtcatccttacatgaggagatgatccccatgcaaagaattagtcctaatgttattttactaaaatatttcattaatagattcttttatattatcgttcaatacccaaagcatcacaaccacgaatatcttgtgtcttatcatataacagaacatacatacctgcctcaatataaggacatacgctagttacatcaatcgagatgttgggattgtctgcaatatccaatatataaagctgcggtgtcagtttctcgtctactttacggatgtcgttagaaccaatttgcaattggatcaaactagggcaagtagtgataccggtcggccattggcgcaagatacgattgccttccgcatcacgttgatggcgaattccgaaagctttcaactggctactgttcaacggttgcgtcgggaacgaagagaaacaattatagctaacgtccatattgctcaaataaggtaaggtagtcgcccggaagtcatcagacaagctggtcaatttattgaaacgcaaatctatagtagtcagcaaatacgtattcttatagtttccgtcttttggtttcaatgaattttccggaatcgatgtcattaaattgttgctcaggataattgtcgaaatcggagaaccggttgcaaacagttctgtagggaacttctggatttcgttatatgacaaggttaccgttgaggcattaatacctttgtaatcatccatcgaacaactgatgttacgtccctccgaacctattttattatacgagaaatctacagatcccatcacatataccgacttggcattgaatatattcggaatatatttcagcttattatgagaaaatcctaagccttccacttgatcggtaaatgcacagaaatcttccggaatctcttcaatctgattgtagtctaacttaaggtcagtcagtttaacattggtaccaaaagcttccagatgtcttaccttattatgcacacaatcaagtaagcctagtttcaccatcttctgtaaagaagcagatgcgggaaactcttccaaattattataacccatataaaaaatctgaattttaggtcctgtatcctcatcgtcagcgagtcgtgtccaatcagcttttaattgggcagcactaatgcctctgttacatgcaatgttcaatgactgtaattcaggaagatcatacaagaagtccggaagctgcgtcatattcggacagttatacaactctacatccgtgagatctttcaaattactccaactcaattcttcattttcatactgtttggcataatccgagttggcatcttcccaatcgacagcaatattatcataggtaaaaggagaattagcaaaatagataatctgcaacttggtcaaccgttgaatagccttcgaaataaacgttattcgattggtaagattaccgatttgtgtatctttcaatgaaatacggctatccttcttgatcggtttcatttcaggatttctattaatggcatcttgtagtaggtctgacaaattcaagcgttggtcatagtcaaggaacattttcttatagtgcatacgaattctatgctttctttcctcgctcatgtccggagtcagttcttcatctccaaataatctgccgctcaccgtttcgctatgtgtaccgaacgaaagcacttttaattcagttaattgtccgatagcatcgggtactctgcctttggcaccgaaaccggcaagcgagagtccggtgacacgcccattattatccaaatcaacaccgggttggtcaccccacatatcaagttctttgttgaagttccagtttaaactgtgaatagtattgtttatcgtcccactataatatctccaattctttccgtccaaagcttcccaaatggctttcagcgctttatagtctttaatgtactccgccgtttccttcaattggatagggacgttggcatcttttgtcaatttgttgtctatcacagtaaaagattctcctcttacagattgcgtttccaattccgatcttttgataccgctttgtgagtaggtggtatatgctactacctgataggtaccggcaggaagccatacggcagagtcgcatgttgctacacctatatccatatacttatcattggcattatcgggattttggtgttctttagaatcttctttataggtgactttcatccccttcaattctgtggtgacacgattaaaggaattcatcaccgtaacatcgacatagcgaatattgctgaataagtattcgccggctgcacgtgtactaattccttctttcgacaatttaaaggtaacggttccatgcggaactgcatctacagtcaatgctttttccagcaatcctccacttacaactgtcagttcattgtcatcgccggcaggtcctgccaacagtacctcatcaagaccgtcatacaaataatagccgacaatcttataagtaccggccagtaattgcaatttgtcactacgcagaccatattccgcattgttcgcattgtatgcgttcagaagcagagtttgtgaaacggtggtaccgttatgcgtcatcaccacctttatcttctgtgcactagacattgattcaagtttgcccacagcacgagtggttgttcctttctcaaaagaggtactcttatagagtttaaactgcacataaccgtattggctttgcagctcctcgtcatcatcggaacatcctgtcactaccaacattgtcagcaggccgacaataaaaggcaggaagaatattgagtatattttatgtagattcatttataatctattattcgttataattattcacaagtaaaatatgcattatatattgataaccagcatatgcttgctaccgtcttctccggtaattattaaaaatacagttttagttaaactgcttccattgcccaaccatacattcaaattttgctttccggtactccaatcttcagatatttcaatatctgaagatgcatcaactatcttttcgtcaacatcataacatttgaaatcaactatactggatgtattaagtgtcacaaatatagactccccaatcggcggattttttatatcagaaatatcagttacctcatattgggtaatgaaataattagcacctcccatactaccatcataagctgtacaactcacaggagctaattggctggtagttacagtaaagggcacatctcctccaccgccacttccggcattgctgattctgacaatcaacatcagtttatttcccgattcatcagagactattaaaaatacatctttaccgtttgcagcctctgtatagattgttatgtcagtttcgcttattggttcagtaacgccattggcctcttgttcatcttcaaagtaatagcaaactgaattgctccaattaaaaggcatttttgccacagtagcgactgatgcaggctgttttatctcaaaaattcctgtcacgccatactctgacttaaagtaatctgcatcgccacctgtataagacgtacaatcaataggattatatgtttgaccgtctaccgcagtaatggctagttcatcgccaccgcctttcgtttctttctgagtaaactgaagaacaagattagactgctcatatttataaaccaaatcttcaccgtcaatgatggtcgcttccaaattatctttgatatcttcatattgagcacgtgagaagacaagaacatatccaactctttcagccggttcgtacgaagcaggagtatattcgtctacaataagtgtcgctttaccaccttcacgttcgcaacgcatccattcattatagctggcatccatgatatacaaatcattattgttgcttcctttttcaacgaatactacctcataatcatcgttcaatgttttaacagtaaaaggcacacgattcttaagagtcgtagtactgcctccggtacctgccactccacctgcgctctgagtaaaagtctttccgtccaaagatacagcccaatcatacttattagatgacggaagtgtcatttccagtacacccggagtcataccatcataagaaacgttgaaagaatagaatgcttttccttcttcatccgagaacgttatcacatttttatctgaagccggaaccggatatttttcacggttatcatcttctattattttcaagccaccacttactttctgattaaccggaccaacaagagaaccaccttcgagttccacccatcccggcagattggtagcagcaaagcggaagtttgcttgcacactaaatttagaaaagtgttggtatcctactttcagttcgttaatctctactccttcttcatcgaatattttcaattcatatcctgctgccgagcgcgtaacctcaccgatcacaatagtctgaccacccattgttaactccaacttagccacacttgcgttatcgttattttggttttcattagtagccatgattgttacggtttgcgttccagcagttccggatactacaaactcttccgtatcgttgttctgaaacttacaccagattgttgatgatgccaaactccagttagtattagccgtgaaagtgaactcttttttctcgcctgcattacagacaatattttgtttttccggaaatatcggagtcaccgtatcatcatcatcgtccgaacatgccgtcaggcagaaagtcataagtaagccaatgaagaagcagctcttgcacaacatcttcatgcaagaatctcctagtggttttaaactaaactttttcatatccatttatatttcttgtttttttaatatccttgttcttttaatttctccgcttctgcttcgcttatccattcgatcacattgacaaacgtgccaaccgtaccgtatgatgatccatctctattgttcacgcttagcgtgacatactgtaggacgaaattttcgttagtactgaagtaagaagtataagcggtaggttgattcatcagcaacttgccatcaccgtaaatagttccgaaagccgttgctgtagatgcacaaagctgttcatccatttcaactaggggttcttgaacatcctcacggttgaaagtgatttccgtatcgtatccgtcatagtaaagaccatgtatggcaatggtattttctttgccttctacgatatccgaagttaccaaacgcaattctaaattgttcaaataacttgcaaaataagtcgaactgacaacacaataacctgtaaagtttttaatgtcaaacggacggattttctgcattacaacttttgcttcagttccatagagtccccattgttccgtttcaggaattaccagtcgcaatgcaaaacccagcgaatcattaatttccagattatcataaataccttgtacctctaaattggtactcctttctcccgccttaatggtaacggtattcgacagaattttataatgcttaccttccacggcattactttcgcgatcaattacttcgacagcgaaggtccggtcatgatcggcagccacagtagcagagatcggaacattgaatatctcattcgtttcttgcacggcatacgtataaagcgtgtcagaaaacataagataactgggtccgttgtatgccaccttgtcctgatcgcatccggaaagagccatcagagcagcaacggctgctatacatcctaataataatttcttcattatcatatgcttttaatctatttgttactttcattcggttgaacctgcgaaccgggagcatccagttcatgctgcggtatcggccatacaaataatggatcatctgcttccactttcaagctgctaccgttagccagtgactggtcttgcggcttccgttcgaatcctttatgccaacgttttaaatcatggagacgaaaaccttccatataaagttctttcacacgctctgcttcgataacttccattgcattggaagcagacaaagcagtagaaccaccgtaagttgaataacgtgctgtacggagagtcgtaatatcttttcctgcacgaccatagtcaggttgcgcttgctgcacataagcttcagcacgtatcagatattgttcggacagacgaagcactttaggcatagatacgtgaaggatctgggcatttgtaaattcttcattgcccaaatacttaatcaacaaaggccaggaaagaccgtggctatagccggtagtgtatgtttgaaagaaacttgacacacgtaagtcgttactatcatacgaattgatagcccaagttgccggtacataatccggacggtagctactgtaatcatagttaaaaaagatctgccccaaactaccaccataagaatttacagtaaaaccaactttccagatagcttcggtagagaggtcgctagtccacatatatttataatagctgacgttttcggacacataatttgtacaactggacaataggtaataattactgtctattactttactggaatacttaatagcttcatcccattttctcatataaagagctacacgtgcacgcagtgcgtatacagtatattcattaaagaatgcagcagtgttgtacaaagcatctttgccggtaggctggaagtctttatccaatgccagtaactcagcagcaagatcaagatcgtctaagataaactgataagaatctttcagcgaagcacgcttcatttcttcgtttcccttataatgtctagtcaaaataacacccaattgattggcagcatcttcatcgctttcataagccttgcagaaaagtttaaccagttccgaataggcaatcgcacgggcaaaataggcttcaccgcaacactggtcaatcagatccaaatcatcatcattagttgtgttctttcttacattatccacacggtcgagcagaaagttacagcgattgatcacattgtacaatgcagcataaacaccttcaatattggtattggttgccaatatgtctttccaacgccagatttctccgtaaatattcgtattaccatttactccatacactaagtctgtctgcaaatcgggcagcaatgtaagactcccggaataaagagaactacttttaaaagcatcatagatacctatgactgctagatttacgtcatctaccgtttggattgcctcatcgaaaggtatagaatcttcaggcatcttatccaaacatgaagtagtggataacaccacggcagccaacaagatatataatttaaatttcttaatcatctttcttttatatactattagaatgtaacttcaatacccaaagtgaattggcgcgaagccggatactgtgctctataaatattgcttgcaacttcggggtctagtccggtgaagccggtccaagtcagtaaattctgtccttgcaaatagacacgtgcagctgagaagaaattagttttcttcaaccacggctgcggaagtgcatatgccaatgtcagattcttcaaacgaaggaaggaagtgttttcaagaaagcgatcgtccaatctcgccaccacgtcgtagcggggaatatcagtaatatcaccgggctttttccaacgatcatacaataatcgttttgactgattataggcactatagattccgttactctcttcaaagaagcggtcattattcatcacgtagcgtttcgccatccaactaaattgagctgacaacgaaagacctttccacataagagtagttccaaaaccacccgcccatggagagtcgaatgtcttaccggtcattactttatcttcttcacggaattcagtagtcagttctccgtcagcagtataccacaatgcatcgccattggctggattcacaccggcataacgattcatgaagtattcgtgtacagaatgtcccactacgtatttcaatccggtagtagagttaacatattcttctacaccgttgtagagttccaacaacttattcttattataagagaaatttgcactaagattccaagtaaaatctctcgtacggatgacgtcaccatccactgccacttcaacaccccggttcatcatcgcaccgatattatcccaatgaccggattcaccggatatggcataagactgaggaacaaacatcaacatattagtggtcttcttatgataaaaatcgaagtttacattcactcgattaaagagtccgacactcaaaccgatgttgttagcccaagtctgctcccagcctagctcttcgtttccactctgcaaaggaaacagaccagcttgatcaaggtagttagcatttccagaaacaagcgccagatgatcgtagtcaggaatagtggagttaccggatgtacctgtgctcaacttaatctgagcaccagtcagccattccacatctttcaagaaagcttcgttttttatgttccacataaagcccaatgaccagaaagccccccagcgatgatctttaccaaaacgggaagaggcatctgtacgtgcagcaacttccgcataatacaaatctttgtaattgtactcggtacggaagaaaaacgacataaaagaatgggctgtattagcatcttgccatgaagaagcccgtgtaccggcggttacatttgtcaatcggtcaatggtctgtcctctcgttactacttgaaaaccggtcgaacgatagtctatcccttcttgtcccaacataaagttaaatgaatgatcctcattcaatgcccatcggtaatttgcagtaagagtttcagtcaagtttagaatatccgacgaactgcgtccggcccttcctgaattattattaataatgtagctcggataagacttcataaaagatgtagagtgagcataatcagcaccgaattgtgcccggacagtcaagttcttaacaggagtaatatctgcaaaaacagttgacaacaacttatattttttatgttctacagggttatttgccatccactcaatagggttctgtcctgtccctttccaagttccgtcattttcagaagctaaagagccatcagcattataaggattccagtaaggcaacataaagcgtgaaccggaaataggagtataaagtgccatatctccttcttcagcctgcgctatttcctcataagccatcatcgtattggtacctatttttaaccagttgctggcttttacctccgcattggcacgcatgttataacgacggaaagttgaactttgggcaataccgtcctgatcgtaaaatcctcctgagacatagtagttcaaacgatcggtagcacggttaacagacagttcatagctctgcaacggtgcacggtcgttaaacacttcatccagccaattaatattagtgcgggaaagcagattgtaatctttaccggtatcctgacctatttccttttcaaattggatacgctccggtgtattcatcatcatccagttatcattcgacgccaattgtgagaacccccactgtccgcgcaatgtcacttttgctttatccattgccaatccgcgtttagaagtgataacaaccacaccattcgctgcacgtgcaccataaatagaagtggaagaagcgtccttcaacacagagatagactctatatctcccggactgatcgtattaaagtcagcactggaaataggcacaccatccaaaataaacaacggtgccgtacccgaattaattgaattcgtacctcgaatctggaaaacagccgccttactaggttctcccgagttagagattacagataatcccggtgtctgtccctgcagtgactgatcaaaacctgcagcaggcacattttccattttttccgctttaacagtggatacggcaccagcaatcgtcccttttttacgagttccatacgctactaccactacctcatctattaaagcagcatctgaaaccagacgaacattcagtgttccggttttggcactaaccgcatgtgcctgtgattgcataccgatataagagaacagcaaagtagcacttgccgtacccttaatctcaagagtgtaattaccatcaatgtcggtaattacaccatttgtagtacccttctctaaaatagacacaccaaccatcggctcattatcttctgccgaaacaacatgtccttttaccttatatccactctgtgcaaaaagcataagaggaatattcagtagagcaaagagtacaaacaagagaattgattttctcatctttgatacttgaatttaaattaatgaattgatttattttttacagatttatctacaaaacgaaaacttagcatattacgcttcacgcatgaaacagcaatatacttctccccttggagcgactttgaaaagtatacttttatcatcgttccaggacagactatcaaatagtctatacaatatatagaatagggaaattagcttggctggtttttaatattacgccatatgtctaaataaatgtcttgtgtcgctgcaatactaataaagtgtatgtccatctctctaaaattatagatattaataagtgcttatcgtttgtttaggtgtaaattgcctataaaattctttaatttggctacaaatataattataatagttaaatagaaaaaacaaaaagtctcattttttataccaaatttcctcaaatgtctttttattgcataattaacaaaatattaataaacaaatagatatatcccatataaaccgtcaaaaataagaccatcttactttccatttgacattcttattagttgcttatgcaatagtcattaaaacgacataagacacctcattttgaggattcagagtcaaaagggcaaaaatccaaaactatttcctatttttgtacccactatatataaaaaggtacaagatgaactacggattcgtaaaagtagctgcagccgtgccacacgttaaagtggccgactgtaaattcaatgtagagagaatagaaagccaaatcgcaatagctgaaggtaagggtgtgcaaatcatagtattcccagaaatgagtattaccggatatacttgcggtgacttattcggacagcagattttgctggaagaagcagagatggggctaatgcagatactcaataatacccgccaactggacatcatctctattgtcggcatgccggtagtagtcaattcaaccgtgatcaatgccgccgtagtgattcaaaaaggaaaagtactaggtgttgctgccaaaacttacctccccaattataaggagttctacgaacagcgctggtttacttctgcccttcaactgacagaagataccgtacgcctatgcggacaaatcgttcccataggtgccaacctgctgtttgaaacttccgatacgacttttgggatcgaaatttgcgaagacctttgggctaccatacctcccagttcctcattggctttacaaggagcagaaattattttcaatatgtctgccgataatgaaggaatcggaaagcatcattatctttgttctcttatcagtcaacaatcagcacgttgcattgcaggatacgtattttcttcctgtggtttcggggagtccactacggatgtagtatttgcgggaaacggattgatttacgaaaacggctcattactggcacgtagcaaacgtttctgcatggaggagcaactgatcattagcgaaatcgatgtggaacgcatacgggcagaacgtagaatcaacaccacttttgctgccagccagggaaatccaggagataaaaaagcaatctccgtcgcaacggagtttattaatagcaaagagcttactttgacccgagacttcaattcacatccttttgtcccccaaggagcagaactggatgagcattgtgaagaagtattctctatccaaatagccggcttggcacaacgactggttcataccaaagctaaaacagctgtagtcggtatttccggaggattggattcaacattggcattattagtctgcgtgaagaccttcgacaaactcggtttaccccgcaaagatattctgggagttacaatgccaggctttggaacgactgaccgtacttataacaatgccattgatttaatgaaatcattgggcatttctatccgggaaatcagtattcaagatgcctgtatccagcatttcaaagatatcgatcatgatatcaatgtacatgatgtcacctatgagaactctcaggcacgcgaacgcacacagatattaatggatatcgctaaccaaacttggggaatggtagtgggtacgggtgacttgtcagaacttgcactcggatgggctacgtacaatggagatcacatgtctatgtacggtgtcaatggaagtattcccaaaacacttgtgaagtatctagtgcaatgggtagcggaaaatgatatggatgaggacgctaaagcgactttactggatattgtagatactcctatcagtcccgaattaattccagcaaacgaaaacggggaaatcaaacagaagaccgaagacttggtagggccttatgaactgcatgactttttcctctattacttcctgcgttttggtttccgcccttccaagatttactatctggctaatatagctttcaaggatgtatatgacaaagaaacaataaagaaatggttatctactttcttccgacgtttctttaatcagcagttcaagcgctcctgcctgcccgatggtccgaaggtaggtagtatttccatcagtcccagaggtgactggcgaatgccaagtgatgcaagttcaactatctggctcaaagaaatagaagatttataatctctttgatctttcttctgtgacatttttgtatttatcttaagtattatacggggtaaaacaaaaatgtcacataactgtatatcaatcatttagttcacaaaacgccccatattcaagagaagtttacaaaaaaacatgcgattgtttttgactttaggggaagataaactgcattttctttataacagtaagttcttcagccaattagctacaaatgcaaataattagccaaatacacttaaacaaccattcagctacacttgtgtatcctcttgattacacaagtgtagtttattagttactcaagtctaacagattaaatcatttagaagaataaagtaatagatcaggagaaaatagcagttcatgcagaagaaaacattaatccttccgcatgagttatatagaacatacggtcaattgcactattgtaatacttctcttttaatacgttctatatcagccttctcaatagtgcgaatgatatttttataaatacgatgaaaaccgaaacctccttcggtcatttcctgaatagctttttgctttgacactccttgaaatacaatacgatacatagcacatactgcgcctgtcctatcagaaccgtgatgacaatgaaagacgattggccctttgcggttcttgataatgcgcaatgcattgatcaattgatcttcactgactgaatgcgctttcatttttagccgataaagcttaatctttgttcctgccgcctcatcatcgtcactatgcctgttgcgaagattcagcacttcacgaataccgtatttctccaaagccttaaagtcagcatccgatggttgctccgaacgatatacacctgagtctatctgatacaaattagtcagtttactatcgggaacagttatcttttcagcgtttatgttttgaccataaaccgaaaaagacatcactatcccgataaataaaccaagccaaattcgtttgttattgattatcatatagcaatcctatgagattatataatatgatgaggcaaattatagtactcctttgctcgaaggaagctcaaaatgatagatatctcttttcaatgccattttcagagcacgtgcaagcgctttaaagataccttctatcttgtgatgctcattctgtccttcagccttgatgttcagattcatttttgcagcatcactcaatgatttaaagaaatgcaggaacatctccgtcggcatctctcctattttttcacgattgaactctgcatcccatactaaccaaggacgacctccgaaatcaaggcaaacctgacaaaggcaatcatccataggcaaagcataaccataacgttcgattccacgcttactgcccaaagcctgataaatacattctcccaaagcgattgcagtatcctcaatggtgtgatgttcatccacttccaggtcgccttttacccgaatggtcagatccattccggaatgcttggctatttgttcaagcatatgatcgaagaagccaagaccggtagaaatatcacagcttccatttccatcgagattgagagacacataaatatcagtctccttcgttgtacggcgaacttctgctttccgctcaccggcaaaaagaaactctgccacctgatcccagtctgttgttgcaagtgcgcaaacatcttccagacctttctctttcaaatcatccgttgcttcttgcagataaatagcacggcaaccaagattctttgccagctccacatcagtaggacgatcaccgattacaaagctttccgcaagatcatattccggattatcaatatacttcgtcaacattcctgtacgcggtttgcgagtcggcgcattatcttccggaaaactacggtcgatcagaatatcatcaaaggtaatgccttctccggccaatgttttcagcatcaagttgtgagcaggccagaaagtgtcttccggaaacgaagatgtccccagcccgtcctgattggtaaccatcacaaattcaaaatcaagcttgctacggataaagcccaaattacggaagactctcggataaaattccagcttttccagtgaatcaagctgataatcaatgggaggttcaatgaccaatgtcccgtccctatctataaacaatattttcttcttcatatactatccttgatattttttgagggcagcaagtaacgtattattctccactctggtacccaccgtcacacgcagacagttgcaacaaagcgaaatggaatgacggttgcgcactatgatcccttcacctaccaaataattgtaaatcttcaccgcatccgttactttcgccaagaagaagttggaatcggacgggtacattcggactgtacaaggtaatttcgcaaattcttcttccagatagtcgcgttcttccttcaatgtttttatccagcgttctatttcataatatttatgcagcatagcaatagcctgctgctgtgtcagctgattcacattataaggatacttgattttactcaggattccgataattgcttcggatgcaaaagccatacccaaacggatagcagcacatccccaagctttggagaaagtctgaaaaacaaccagattcggatatttatccagctcttcgaggaaagaaggtgcttcggagaaatcattatacgcttcatccaatatgaccaatccttcaaattcgcggagtattttttctatttcagaacgtagcaggtcgtttcccgtcgggttattaggtgaacacaggaaaatgagtttcgtacgctcatctgtagctgcaagaagcttttctgctgagaactggaagttttcgtccaacaaaactttccggtactccacattattcacatcggcacagacctgatacataccgtaagtcggatcgatagcaactacgttatctttttccggttcgcagaatgcacgaaacaccagatcaatcgcctcatcactgccgtttcctaaaaagatatgctggggagaaacctttttaattttagacaacagagttttcagttcccactgcatggggtccggatagcggttgtgaggcaggttataaggattctcattcgcatccagaaaaacggaagccacagcgcctttatattcatcacgagccgaagaataaggctttagtttccatatattcggccgggtaagttcttgtaatgttttcatttcaatgtatttaatcgtactgtaactgcattcttatgagcatccagaagttcgttggctgccatttcttcaatagccggcccgataactttcatgccttgaggaagaatttcctgaaacgtgattttccggataaagctgtccaggctcacgccgctgtatgctttcgcataaccattagtcggcagcgtatggttggttccggaagcataatcccctgcactttccggcgtcaatgagccaaggaagacggaaccggcatttattacacgttcagcaacttccagataattttcagtctctacaatcagatgttcgggtgcgtatgcattcgtcaactctaacgcttcatccatgtccttcaccaaaatcagtttactgttttccagagatttcgcagcaatttcccgtcgaggaagctttgccagttggcggtttacttcttccattacttctgcctgaagcttttcagaggttgttatcaacatcgcctgactgtccactccgtgttctgcctgcgacagtaaatctgccgcaacaaacaccggattagcagatgcatcagccagcacttccacttcggaaggacctgccggcatgtcgatggctacatcccgaagacttaccaactgcttggcagccgtcacatattgatttccagggccaaagattttgtagactttaggaacactctcggttccatatgccatagcagcgatagcttgcactcctcccgctttgaatatcttactgacacctgccagttgagcggcaaagagaatagccggatgaatatttccgtttttatcgggaggggtacaaagcacaatttccctgcatcctgcaatttttgcgggaacagccaacatcaataccgtagagaaaagcggagccgttccaccgggaatataaagccccaccttttcgatacctaccgccttttgccagcaagttactccttccattgtttctaccttcttgccaacgaagcgttgggaagagtggaaagtttcaatattccgtttagccagcgtaatggcagatttcaactcgtcgctgatcagtccttcggctttctgtatttcttcggaagtcacagtgagagcagacaaagtcaccttatcaaaagccgcctcatattccaaaacagctttatcaccttccgctcttaccttatttataatagtacgaactgtatcgaacaagctctccgtattcaaagccggacgcttcagaagttctgcccattgttctttggagggatatttgattagtttcatcattcaaacttattagactatcattttttcaatcggcaacaccaaaataccttcagcacccagtcccttcaatttgccaatgatttcccaaaaacgcttttcatctagtacagtatgaacagagcaccagccttcttgtgccaatggcataatagtagggctcttcatgccaggtaacacagcaattatttcttccagtttatccttcggagcattcatcagcacgtatttcttgtcttcggcagtctttactgcattcattcggaacaaaagttcttccagtacttctttcttctcatcgctcatgtttttgttgccaatcaacagcgcttcggatttcatcactacctccacttccttcaagcggttgcttaccaaagtagatcctgaacttacgatatcaaagatagcatctgccagtccaatgcccggagatacttctaccgaaccggtaatgacatgtatctctgcatttactccgttcttcttcaggaagtttctcaaaatgaccggataagaagtagctattttcttcccattgaaccatgacaatcccggatattcaatgtctttcggcattgccaaagacaaacgacatttgctgaatcccaatcgtttgatgatttcagcatcttcctctttttccataaattcattctcaccgacaattcccaaatcagctacaccggtagctactgtttgcgggatatcatcgtcacgaagaaataaaacttcgataggaaaattggaagactgcaccaacaaagtacgcttcgttgtactgattttaatatccgactctcctaaaagtgccattgtctcttcgaagagacgtcctttggcttgtactgcgattcttaacatgattttatttattattttatgatttacaattcgaacaattcagaaataaaaaaaggcttaccgtattcggtaagccttcgttatctttatagagttatacacactatcaatcacgcccaccgagttattcgttaggaaaatgatgatgatgatgtgcaactgtatatttcatatttcttttatttaatgcgacaaaagtaaagcatttgtttgatacttccaaacatttatcacaaaaagttcagtttttatttcaaattaaaggcaatatctcttctggctctacatcacacttatcaaagtgcatttcatctttcgacttttcgtgcgagaacgtaaagtacgtacaaaccgcttcggtacatacttcgccatccttattatataacttagcttcaataattacaatatttcgcttgacttccttaatagaagcacgcaacacaatatgggaatcagtagtactgaccggcttgcggtaacgagtctccatttttgaagttactcccgttgtctgtaatttacgaagtatcacccaagcgcaaatttcatccatgagaacagcctgaataccaccgtgcaaggtattgatccatccctgatattcaggacggggtttccagatacttaccacttcgtcgccatcttcataaaactccatctttattccggcttcattattaggggcgcaaccaaagcaattgtacccttccagacctttccagggatttattattttcttcataatctatgacttctatttaagtttcacttcccaaatataagcaaaatataaaaaagaagaacaattttccacgatttactttcggatgcaacgaatggcgtaagctttatccaacccggtgtttccctctgctatttcgtttttatcacttctcaacaagaatattttctcatccgcatctgtccctgcttcattcaaagtccaataagaaagatattttccttcataggcagactgaaacttgccggcatacattcctaccggatatccatcaaaccccgtgagattggtagcagttcctactattgcaccggcaccggtacttattgctttccatgtcccggttttcaacaaagaggcatcattgctcaaataagttttcagcatattccaatcattccaatcaggcatattccaccccacaggaagcagcttattactgacaattgttccaaaactataaaaataataactcttatctgtttgagacaatagataacctgtcgctccggcattcataatctccagtttcggaatttcttctccatctatatataatgatgttttcagattacttcccatccaatactgcgtaccaattttcactatcgggtaattgtgaatactactcccacgcacatcacgcattatatctttcatggccaatacgggcaacatttcttcaggcatagacaatgctatttgtccgtcaggcaaaatatacaccttacttcgggcagcctgatttccaggagtatatttcaatgaatgttctttcaaatcccacgctacagttccaccgtgcactttatctgcatgtccgaccaattgtactaccgttcccttggataagtcaaccgcatggttatctttcatcggataaacgacaattgcctgtgaagaaaaatcaggcgtcactagatattctttacatatttctgctacctgctgcccagcactcaacactttatacaccttcgaatcgtcaaataccaattttgacacatccacataattatggaagacttcggacccggactgccctgtatttccatcttcccaactattgatttctccttcgactttacttatcaaaacatcttcggtcgggatgaaggaaatcgccagctcactctgcttaccactctgcaactgcaatgaagagggcaatgggctggtatatatcttacctccaacatccaatacgatatattgatagcccaaagtggtttcctgcggaataaggatcacttcttttccgctcaaccgatctccctgtatctcccattttccggcaggagtaatgcttttctcattagaaaaagcggaataagtttctttttggaaatcataaatcgccttagtataaaaaccacaaacagaaagttttgggtcagcatccagtataccctgcaattcttcaccttcctttcctaccaaagcgatttttaatttgaaaaatttgtgatcatagtgcagggcgatggctcctttaggagctgattgcagattttgagaagcaaccagaaaatcagagcagaaatagccggcagaaagattttgatctgtttctaccgccaccgacatcgtactttctcccatattcactccctcttcctgataaggataataactgatcaaacgtaatgttacctcatcatcaggataataaatcggctcactggactcaaaaactttttcggaagtacgaaagaaacgcaaattatccgcataacgttcttccttcatggtggaggaccctacaagggcaaatactcccacttcatcattctcttcaaagccattgccagcaacacgtgtatatgtcacttcatgaatatcagcagtaaatttcaatggaatatctccattgctgactgcagccttctctcccggaatatgatttacacatgctaatacaaaaaaagaagaaaaaaggcacacagcgattcctttttccattctaaacaaaatattcatgtcctctttatttaaatataaataataagaaatctttgattgggcagaaagaaggacataagaggaagtattcactttcagttatgagattccacacaacacgtctgttgcgactggagaatcatcaactccaacatttcattctgaaatgccaaaagcaaaagtataaatcataaatcaaccaatacttcattttcttaaataatatttatatttattcataagtatcaaattagtagcactttataaatcagggatatttcaaaaccaaataggcttacacattattatattagtaatctaacattttcaaaaagaatagcctatttctaccccggcaatatgtttaccttttggagactcatactgataacaataaaaaacatctaacgcccatcgtttagccaaagctatctctactccaggccgataacgcatacgatctgctctccaaaaaggagcatcatccaaactttgataaatttcaattgaaaagtagggggaaacgattcctttttcgggcgcataagctaattttaagcgggaacgaaggcgagcttttgaatcaccacggtcaaaagtttgctgaaacctttctctcaaaacaattttcaaccactgatattgaaaacttgcagttgctccaaagttataacggtgtctgaatttccattccgaatctcccaaattccggaaatgagtttcatatccggcttccagtttcaaaaatgaataagcccgatactcgcctccaatggccaatcccaaacggtccattctacttacgtcatcctttgtccgaaactccagattgcttaaaagtgaaaatcggggatcgatcttatagttcactttgaatttagtccatgtagtgaaatcatcgctttgcgcaaatacagtggaagtcattccagccaatagcacaaacagcagtattttagtaattgcaaatattctactcatcgattaccgggttaaaagtacaaagataataaatctcccgcaaagaaaaattatgatactgaaataattctgaaatatcaaggctcattcctttaaaagaaacaccccgttggttttaaaggaacaggtcgttggttttaaaccaagagcccgttcctttaaaagaaaaagtccctattttatactccactgataatcaatgatttatttttgcttcgcattccacacccataaagcgaaaaataccgacaatatagccgatccgatccaaaaccaattgatataagtaaagtcgtaaacctctaccccactccggatcgttttatgtccttcaatcaaaactccgctcatgacatcttgcagcccagctccgatataactggcaattccaacaactcccaaagcagctcccgaagcattgcgaggagcaatatcaacagccatcagcccacctaagaaacaaatcagtactccgatgcccagtccaaagaggatcattgccacagcatcgagccaaaagtgtacccctggcactaataagaacaaagataatgctaaaacattcgtcagtccgaaaatcaaagccggaacattacgccggccaccaaacagtttatcagaaattacaccggaaaacatggtgccgataataccacaaacagaactaatggaaataatgaaactggcatccaaagtggaatatcctttctgtgcttccagataaaaaactccccaactgtttaccgcatatcggctgatatacataaatgcacttgataaagcaaggatccagatagcaggcattgtcagaacctgccgttgagctttattaaaatctgtcgtttcggaagcactcatcgttttcttttctttcggaacattgaccggaggaaagcccttgctttcgggactgtcatgaaaaaaacgccatacaattaatgcccccagcaatcctaccatacccgccccaaagaaaccataacgccagccgcaaacactaacaatagatgctacaattataaatgtcagtgcttcaccaatattatgactagcggaccaaaagccataataagagccacgttctttatccgtgaaccaacgggaaagtccgactacacacgaagcagcccccatagactgaaaccagccgctgactccccaaagaacagcaaacaaaataaatgaatgggagaaaccgagacaaagattaatcaatgcggtaacaagcaggccggtagtcataaaacgatttatattacttcgatctgccagaaatccattcgtaaatttacccaccgcatacgtaaagaacagcaccgaaccgattattccgagttccgtttcagaaaagattccctcgtctacaatcggtttctttactacattcaagctcaaccggcagacataatacataccgtacccgaaagttgccgaaagaaaggtagaccattgcagatatttcaaccgacgcttgccggatgaagacataacgtcttcgttacaaggccccggtgaagagaccttgtaaaaatttataagatgtttcagcatgaaggaatatctttagtcgtgcagtttctttttacgcaaatattcgagtaataatgccgggcggtctgtttgaatcagtttagccccctgattcaaaatccatccccagctttcatccggttggtgtagttctaccgcgcgatcgtcatcgtgacctccacaaagttcaggccacaaagaattaatgaaaagcttggcaccactatcacgtactttcctgatcaagcgaagcatttcttcattatcatcattaaataccagttcataagcagccggtttcatgtgtgactgataatcattgattatcttttccgctccttctttgtgcagattcacaataggcataaaaataaccttatcaagtacatcaccattttctgctttcactcgttcataggggagtcctgctttaattacgcaatggtcaattgttcctgttttttcaagtacagcataagcttcctgaaaataatcgtaacctttatcgatattcaccattatcttccctttgcaaagtaacataacttcttcgagagtaggaatctgatgtctggttttacagcctgctccatttttaagtcgcattgctttcagttctgccagtgtataatcctcagcgtttccttttcctgtcattgtacggttaattgtcttatcatgcatgacgaccaagtgaccatctttggtcttcttcaaatctatttctaccatatccactcccatatcaatgcaattccgtattccttgcaatgaattttcgggagcatttcgccaatcggcacgatgagaaacgaccaacactctatcggaataatttcctaacaggttttctctgatttccgcaatccgattttgggcaacagccagttgcaccaggcatacaagcaatataaagttataaattcgtttcataaattcaaatattaaaattattagttcagcttaccgttcttccagaccatcttttctccccacataggcacataggtctggtcacagttaatcttggacgcccgttctagtgccatgtccaatgaccatctggatgcatcaacacctgcatgagccatttccaaaatatgggataacagaacataatccggctgtacctgtcccgctccggtacctaaaatattattctcagtcagcgcattaggagcatagcggggaatcaagacattaacatgtggcgcaatgtttgtatattgttccgttttaaaattggaatcaccgacatgcataaagacgaaatttccagtatcgtccccacagtctatctggaaaatagttacgaaatttgataatccggaattattatgatcggtaatacaagtacggattttaaatttacctatttcataatctttatccccctttgccgtgtagggataagtggtgtctttcaaataattggataataccggcttatccaaatcaaacattgcctgaatcaaatctgtattataatgatcagaatgcttatgcgtcacacaaaggaagtcgatatagggtgcaagttccttcgcccagcgatgagaaatatcaatagcaaaacatccggaaggagtcttaactatatatcccatgttataaagcaaccagatttctgctgtgccattctctactttggagttttcaattccgtccatcacccggtcaaaagcactccggtaatagtataagatcggttcactcttctccatactcatacttgcctgatcaaaaccattcagaaaactgataaaatagtcatccagacatttatcggcatatccctgaatagtgctcaaagcatcggcacgttcagtatttacaattgatggagaagttccccataactgttgggtagtggcatctacctctgctgccagttccgtaagaattccttcgtacccggtcttcttatcattattatcatcgtcactacaacttgcaagtcctattgccagcaggcaaaacaggaaatattgtattcttcttatattattcatattatttcagtgttttatagtcatcagttattttatcgaaggtctctgcaatccgttcaagagcaggtctcacattattattttcgtgatccttcgtcgcttcatacatgaaaacgcctttatatccggtcttctccaaatcttgcatcaactttccccattttatatttccctgtgtaggaagccagtggcattcgttcaccaaatcaaaatctgaagcatgtatagtgccgatacggctacctactattgccacaaagtgctctgtcgtgcctttggtatagtgatttgtatcaaagcacacttttacgtccgggatatctccgacaatcctcataagttcctccggagtatttcccaaacaggttctgggcagattctctatacaaagttgagcgccaatcctatcagcatatttcttcaaataagcaatagactccgaagcattggcaatccgttgcgcccgaatactatcggctatcggttccgaacttggatgcaaaaccaggcaagtcggttggaacatggcacacaattctatcatctctgccataaaatctacattttccttccttaaccgatcatccagaactgagatatccagcgttcgggagaaaggaagatgaatagaccagacttcaatatccgcactgtctatcttcgctttcatttcctttatacgtggaatcacttcatcgacaggaactcccctataacattgattaaaggctacttcgacatacttcacaccaatcgcttttgcatgaaggaagtcggcagcagcaggtgctttccacactgctgtcgtagtacctacttcatatttctgtgcatatccacaaacagacatcaccataaatgcgataaatatcaattttctcatcaccgtttatttttgtcggtttgtaccttgaatatctccaccccgtatactccaggagtctgtttccaacgttttattaatgtcaaacgcttttatagaacctatattgctcgctccaatagtaccacaataaagacgcttgtccggaccaatcgaaacggatgccattacctgttgacccacagattcctcataaacagtacttccatctgccgtattaagtccgaaaatcttattatttgactgcgttccgatataaagaacaccatctgtactcaacgcagcaccactgtagttcaggttattatttaccttcttcacccatacttttgaaccgtcagcgtctacagcgtaaactgtttgcgaacctttctctgtaaaataaacaacacctttcttatctacgatagggaaataagcatcaccgcctgttgtcggataggtccattttttggttccgttcgtgatatcaacagcaacaagtccagcctttgacttcaaagttgcgtaaagcgtgttgccattcaaagcaaaagttccctgctctgtcacattaacaccactgagtttccaaagttcttccttatttgcgctgaaagcataaatagcttcactggtacctgcatagatatgtccgtttctatcaatagccaccgcacttcctgttgttccatcaagagattgttgccatttaatcgcaccattcgcaacatcgagtgcatataacgtacttttattagtcaaacaatagagtacaccatcagcagacaaagcagggaacgcacctatcggtccgtctaattgcaatgaccatttctgagtaccattcggatttatggcatacacattcttgatagaagcatctctcacgcactgatagatagtaccgtcagaccccactaatgcaccgccgccataagttattttatcaatggcaaatacccatttgaattcgccgctgactacatctaaggcaaacaaatgcccggcaggcgttgaagtcggaatatacatcgtctttccatccggggagaatacaggattggacgtcttgacatatcctgttaatccgttaaaatttagattcagactatcccatttatattcgacaacattaatttccacacttcctgactccgtcgtattattcgtatatgttactgtaatagtaactgtataagttccagtagcagcaaaagcatgcgatggagtcgtttcagcagaagcagtaccatcaccaaaatcccagctgacggatttaacattgccaccagtaaaatacatatcgttataagcaaagacagcagactcccagacaaccaattccgtattgactgctaccggataaataattcccggagtagccaccgcttccgccgaaacagaattccccatcggataaatgcaaacaacatcaaacttatactcctgatcattagtcaacccttcaaccatatattcttccaatgttgtgtcatccaatttgataacctgattgccgggacttacggtaatctgataattcgtaaaccgttcgctggcaggcttcgtccatctcagccggactttcttgtctcccgctgacgcagtcagaccagtcaccggatatcttgcattctttggcgtacaagaagtagatcgcttactcgccaatcctccggtatagcgaggttgtacggagaatgtataagcaacatcattgacaagatcactgacagttgcaccggaagcctcagcctccacagtcatttgccctccttccgctcccgaagagcccgaagtccagctaataagatattcatcaggacgggcgtccggatatgcttcccaggaaagtgccacattcatatctccggccgttgccgtaagcgtctttaattcatataaatcaaaacttgcttttggcagttcttcgtcacaagctgcacaaactgccgtaatgacaaacaacaagctatatattatttttttcatcgtctgaattctttaagtttaaccatattaataccccggattctgccacaacaactcggtattgttgattctttccaattccgttttaggaataggatacagaaactggaaatcctgaattgtatgtccctccgctttcatagcttccttggcacctcccatgcgaacaaggtcaaaccaacggtgtccctcataaggaaattcctgttggcgttccagcataatggctttacggaaactatcctgatctgccagttccgtaatctgaaccggagataatccggcacgggtatgtaccgcattcaaagcaaccattgcatcagaagtctgagagttgctatagctgatttcgttcagtgcttcggcatacattaacagtacatcggcataacgaagaataatctgatcgttaccgacggtattgtatgtcgcacttttcaaatccttgaatttattcattacgcaaactttatcttctactttcacataagtgatcaggtctttgcgtttatcaccgtctttatagcactccttcaaagcctttgtctggttagtatcatctgtcaggttgataattgaaaaccaataaccatgtccttcaccctcaacgtccttattaaagcgcactgcgaaaatgatttcatcgttcattttattatcgacatcaaatactttatccggtgtaggcatcaaagaatatctgcctatcagttgcgaaagtacattgcgtgcctctgtccacttatggaaagtcagataaatctttcccagcaatgccattgcagcaccggaggtcgcacgtcccgtatcagtacccgtataagaagaaggcagcatattctcattgataacctgattcaaatcgccggtaagaaaatcaaagacctgctgctctgagcttcttccgattttaagagcttcagccaccgtcaccactttatcagtcatcggaattccaccccacaagcgatacatattaaaataagtaagagcacgcacgaaaagcgcttcccctttatattgtttcttcaacgtagcatcaaagtcagctgcgtctattttgtccaataccaaattacagcgatatactccgttattaaaattcgcccaggcggattccaatattccattagaggctttatccgcaaactgatctatatcataacggtcttgtgttccggcagtaggagcactcaacgacaggttgtcactccgatattcgcagcattccgtgaagtaggaaacctgtccctgcaatttagaataacagccgatcactgctacattaaaatcgtctgctgtcttgtatactttatctgtaggcacactgctacttggctccaagtcgaaaaagctatctgtacaggccactgatacaaaagcagttgccaagaataggatttgtctatatattttcatacaccgtatatttttaaggatgactaaagtgttatatttaatccaaacaagaaggttttcgccagcggatatgttccgtaatcttcacccggcgaaagtgaattgctcggacgtgcatttacttccggattgtatccaccgtagttggtagatgtccaaaggttctgtccggagacatagactctcaacttctccacaaagaaacgacgtgtcagattctgaggcaaagtatatcctaacgttacattctgcaatctcaaataagaaccatcttccagatgccaggttgaagtacggccattataacctttcgatttgcggttggcacggttcacctgaccatttccggggttatccgcacttttccagcgattcagggcaatcgtggtaccattggtgtttccttccaaattatcaatatagcgacgattcagattcagaatctcattaccgtaaactccctggaagttaaagtcaagatcaatgcctttataccatactttaccaccaaatccataggtgaagtcgggcatatagttacctactatcgtacggtctttgtccaagtccatcacaccgtctccatccacatctacaaaacggaagtctcccggctgagtattgctgaaatgaggatatttcttcaattcttcttcgttggaaaagataccgtcctgcaccagcaaatagtaacatccgatcggttcgcctacttttgtgatataataagcatgatctacgcttccggtagagataatgggagcatttcccggaccaagagcttttacttcattggtattcgtagcatagttggcattaaaagaatacccaaagtctttggtgaaatttttctgagatgtcaaggctatttcccaaccacggttatttacttttccaatattcatcagggcagtgctgtatccggtcagatgaggaacaggaacattcagcaacatattggaggtattggtattatagtaatcaactgttatccccaataatcctttgaacatttgcaggtccacaccgacattgaccattgcattcttttcccagcttaaatcatcattcttaattgtattgggcttataaccttgtaccagttgcccgttacccgtacccagtatataattatcaagagccatcaatgatagatgatcgtagttgcctatctgaaagttacctgtaacaccataactggttctgattttcaagtcatctacaaaggagagaaatttcgccttcgtgaagaaatcctccccgctaactctccatgccaatgatgcggacgggaaatatccccagcggttattttttccgaaacgggaagaaccatccgcacgaatagctccggaagccatatatttacctttataactatattgcacacgagccagataggaagcaatcgaccattgggtcttatcagacgccccctttataactgttccaccggagatcgtctgtatataatcattcggaaaatcggtagccgtcacattatctcctttataagtttctttttgtgcagattgcaccagaaccgcattaatcgaatgatcttcattaatcactgtattataattaatcttattctcaatcagccaattaaaataaaaaccggaggagctgtatgcagtagggttcgacttgatatcataatatttctggcccagtaagggtagttctgacgaacgatactgatcattatgagaaccataataatcaccaccgaaagaaatattataagtaagtcccttgaaaagttccagttcggcaaagactttccctacaattgccatacggtctactacgtccgattgcagattggccattgccacagggtttaataccgcattgtgctgatagtcattgccaattctccaatagccatttccctgatagttataactaccgtcggaattatataccggccacacaggaggcatcatcaaggccgactgaacaataccattcgatccggaagcatccacccgattggaagtcgaataagaaggagaaaaattaagaccgaatttcagtcttttatattttccgtccagattcatacgcatgctatatttcttgaaatcagaattgatgataataccttctttatcataataattggcagaaataaaataaccaacggtctttcctctgccggagatagaaacattatggctggttgtagccgcactacggaaaattgcatcctgccagtctgtgtccgttaatccctgatcgccgttcagataaggaaaaagttctgcaggaatccgttcccatgaattcggacgcataccattagggtcattgggtgaaccaccgggattagcatccagataagaattatcatgcccgtctttggcaaactccgcaaactgataagcattcaacatcggaagtttttttgaaacactctggataccataatatccatcatattgtactttcattttttccgactgcccttgtttggtagtgataataattacaccatttgatccgcgactaccataaatcgcagcagacgaagcatctttaagtacctctaccgactcgacatcattattattcagattggcaaagccacgctccacaggtacaccgtcaatgatatagagaggatcactccccgcattgactgtactgataccacgaacacggatactgacacttccttccgggtcaccgctcggctgagtcacttgcactcccggcatctttccagctaatgcctgacgaaagtcggaagcagaaacctccgcaatctgctcggctttcacggaagagatggaagtagacacatcccgtttccgctgtacaccatatcctaccactactacttcatcgatcatcttgctgtcttcggtcaacgtaatcttagccgtattcttatcttttgcagaaaggctgacggtcttatagccaatataggaaattgtcaatgtagccgattccggtacattcatcaacgaatatcgtccgtccatatcggtaatcgtaccactgccctctcctttgatctggacactggcaccaataactggctctcccttatcatctacgaccactccctgaacggtacgtgtacgttgagcgctttcttctttaagcggctgtttactgacagcaattgtattatcggtcctattgaaataaagttttgactgagtagttatcactcccagaatttgtttaagcgtagcgttttttacatcaaaagaaacatgcggagcgttatttaccgtttcctgatcgtagataaatttaaagttggtctgttcactgattttattgaaaacattttctaccggctcgttttgtacacggagcgtaatgttgttctctttcaatgtctgagcagcagtcggagcaactaaaaggaaggtgaatagtaaaaaagctaaaaacgagcagctatttctactttttcctttacaaataagaagattattcataaatttgtgcgttttagtaattgactaaagttattaaaaacaagcaacgtgcgatacgttattcatttgggtcgaagcgaatgaatatccgtccgggttgcggatagaagcattccttaggagtgcttctatctttttagggagtttctatgagggtgatgctttcattctgtccttattaacgggttaaacattgatctattttttaattctcattttttataaagaagtatattcctgccttctttcttataattgatatcactgataaattcgatggatttaagtacggactccagactcttattgtcatgttcaccggtaatcagattatcaaattcctgtccggaagcaaaggttatctgacaattataaacacgttccagttcttttgccacatcccggatcggagtactgttaaaacgcaggcttcccttgatccagactgctaccccacgttcttccttcttcttactatattcaccggaaacggtatttatcagaacttgttcttttgcagtcaatcgcatcattgcttccggcagatcaacctgtactttgccactctctacacttaccgatacgatttcatccgtagagtaagattttacatcaaaccgggttcccaaaacacgaacatccagtcgcttcgtctgtacaataaacggcatatcttcattatgggcaaccctgaaatatccttctccttccagttccactttccggatatccccttgaaaagaatcaggataacgtacttgtgaacaagagttcaacactaatatagttccgtccggtaattccacccgtttcttctctccaaaagaggttgagatttcagcgaaagttatctgctgctcactcatataccggaaataactgatacttcctgtcacgatggctattacagccgccacactggctgcaatcgtcattacccgacgaaaccaggtacgtttcttatgttcaatatgtttcagcaactggcgagcctcctttttatacttctcacgctccaagtcagtaacaggctgctggctgacggattcctcccagacttcggcagacaactcatccaatatatctttatggtcagcatctctcatactttccagtaactgcgatgcttcctcccggatgtacatatcatccagataacgacgtaatttatttttttctgtcttcgtatctttcatcatatattcaaataagggtgctgatttctccccttcgtattagtaatacacaaaggcaggaaacagctagggtatgattaacatttattataaattcagacaaagtagaatcagcaatatgtcagcagaagtacccgaatatttagtcaagtaggcacgaatcactttcaacgaaacagaaatatgctcctgtacggtattgacagagactcccagcgcttccgcaatttctttatgggacatctgtaaatctcggctcatattaaagacttcacgctgacggggagtcaattgttccaatgcacggctaaggacatccttcaaatcatcgaacaatattttattattcgtttcattggccgaatcaaccgcatgagaaaggatatgctctttcaacttatcttcattcgccatatcccgtatctgattaaggatacgattgcgtacaatcgtatataaataggatgagaaagacgcatccggattgataaaacgcctgctttgccatacaaccgtaaacgcgtcctgaaaaatatcttcggcaaactcacgagatttgacgaacttcatcgcaaaatacagcaagcgattcttataggcggcatagagttcgcaaaaggcatcctcatcgccgtctatcagacggagaactaactcccgttcgtccataagcgtgtctgttgcgtacatattttctttacttttgggcacaaaggtattgttatgatgttacaaacgtatgtattttttctgaaataaaaaaataaccttctttcttattgagtttccggccgagaactttgtgtactctttaattgttgtcctattataaaagtgcgaacaaagcacacaacaaagttctataaaaaagaaaggaagattatgaaaaaagtaatcgacagagcttcatcaagaggctattttaatcatggctggctcaaaacccaccacacattcagttttgctaactattacaatccggaaagaatccatttcggagccttgcgagtgctgaatgatgacagtgtagacccgtcgatgggatttgatactcatccacataaaaatatggaagtaatttccattccgttgaaagggtatctgagacatggcgacagtgtacaaaatacgaaaacgattactcccggtgatatccaagtgatgagtacgggcagtggtatctatcatagtgagtataacgacagcaaggaagaacaattggaattcctgcaaatatgggtattcccccgaatcgagaatacgaaacccgaatataacaatttcgatatacgtccgctgctgaaaccgaacgagttatctctgttcatttcaccgaacggcaagacaccggcctccatcaaacaggatgcctggttctctatgggagacttcgatacggaaagaaccatcgaatattgtatgcatcaggaaggtaacggagcttatctgtttgtgatagaaggagagatcagcgtggccgatgaacatctggccaaacgtgacggcatcggaatatgggataccaaaagcttctctatccgtgctactaaagggaccaaacttctggtaatggaagtacccatgtaaaaaacattatttctagttttattctattctatttaaatgaagcggtcccactctacagagtgagaccgcttctcattgatagttatatcttcggattatttttccttccgataattctccagtccagtttgcaggaattcaatatatttgggaatgtcttcatcgtaagcataagacttattcaaaggacttccctgattatccagcaatacatagaaaggctgtgcattagcaccaaacttcacacgttgcagatagctccacttatcaccgactgtacgcaaagtacgttccttaccgttctctacgattttcacaggttcggtcaacggagttttattatccacatacagagtaatcagcacataatcattattaatcagatcactcactttcgggtccgtccatacagcggcttccatcttacgacagttcacgcatccatagcctgtaaagtcaagcatcactggtttgccattcagacgtgcatactccatacccagatcgtagtcatcgaatttcgcatgtacttcattcttatacagattaaagtcttgcgtatgcataggaggcgcaaaagcacttacggcttttaacggagctccccacaaaccgggaaccatatatacggcaaacgccagagaaataagtgccataaagaaacgagtcactcccaccttattgtcatcatcgtcatgcggaaacttgattttaccaagcaaatagaaacccagcaatgcaaagatgacaatccacagagcgaggaaggtttcacggtcgagtaatctccagccataagccagatcggcaaccgacaggaatttaagcgcaaatgccagttccagaaatcctaacgtcactttgatcacattcatccatccgcccgacttcggcatagacttcagccatgacgggaacagagcaaagagtgtgaacggcaatgccaatgcaatggcaaaacccaacataccgatagccggggccaccacgcttcctgtagtagaaacctgtaccagcaggaatccgataatcggacctgtacaagagaaagataccagtgaaagtgtaaatgccatcaggaagatactcagcagaccggtagtcgattccgctttactatctaccgcattgccccactttgacggtaatctaatctcaaacgctccaaaaaatgaagcggcaaagattaccagcatcaggaagaaaaggatattaaagacagcattcgtcgataaagcattgagcgcactggcaccaaatatcagtgtgatagccaatcctaatgccacataaataacgacaatggaagcaccataagtccacgcatcacgaatacctttcttcttatctttgctacgtttcagaaagaaactgactgtcatcgggataataggccatacacaaggagtgaacagagccagcaatccacccaggaaacctgtcacgaaaatataaatccaggacatatctccctgagtatgttcctcgcccagtgcctgcaattcactgattaccggacgccaaaggtcaccggaagctacagctggttgaatatcggcatttgcatccgtagcagaagcaggaaccagttccatcattgcagcagagtctttggacgcagcaggagcagttacttcttccgcctcttttgtctccggcttatcagctttggctacaggagcagccgtagttccggcctttgcttcacccgaaaacttaaaaggaacttctgtcggaggcagacaactctcatcgtcgcaggctccatattccagataaccttctatcgcataagctccaccagtcagcttcactttctgcacgaatttggcagtattctcgaaatagcgcactttcatttcgaacagtttgtcgaaagtagctatttccttgccgacaggcttcaatttaccaaccagttctacaccggacttcttctccacattaaatgtggcagaaataggtcctccgtctccaagatcggtagaataaacatgccaccctttgtcaatggcagctgtaaacacgatctccgcttctgtatcagaaagagagttcagttctgttttaaactttaccggatctttaatctgcgcctgcaatgtataggctacaaagcttaaaagcagaaaagaaattaattttctcattttcattattgggggttataattcataatccacgcatgcacgactgtcctttgcttcagctataatctttccggctgccacatgatcagggtgtgttgcatagaacttcacatcctccagcgtgtcaaattcgctatagagagctatatgccaagcctctcccggattcatattcagtccgacttcaatcttacggatcactgaaatcttagcggggagcgcttcgatagcttccttaaatttattcatcactacgagtttctccgcttcgggaacttcgtcttttaacttaaataatacaatgtgtttcaccattacgttgttattttaatgaattgtttctatatttgtcttgtcaatgcattacattactaatgcaaaattactctatttggttcaaataacactataaagagatgttaataataggaatagcaggtggaacgggctccggaaaaaccaccgtcgtacgaaaaataatagaaagcctccccgttggagaagtagtactattacctcaggattcatactacaaagacagtagtcacgtgccggttgaagaacgtcagaatatcaactttgaccatccggatgcttttgaatggagcttgctttccaaacatgtgatgatgctgaaagaaggaaaaagcatcgagcagccgacctattcttatctgacttgtacccgccaaccggaaaccatccacatcgagcctcgtgaagtcgtcattattgaaggtatccttgccttgtgcgacaagaagctacgcaatatgatggatctaaagatatttgtagatgccgatcccgatgaacgcctgatacgtgtcatccaaagggatgtcatcgaaagaggacggacagcggaagctgtcatggaacgctatacccgtgttctgaaaccgatgcacctgcaattcatagaaccctgcaaacgctatgcggaccttatcgttccagaaggcggcagcaatgcagtagctatcgatatattaacaatgtatatcaagaaacatttgaaaaatgaagaatgaaagataaagagttcagaatgagtgccaagacactgatcctccccttgtttcttatacttttgtgctgtgtattcggatgccggaacaaacatcataccgaaaagaatgaaacagcacacgatcttccacagattaaagacagtggagaactggttgtgctgacactctatagctctacttcatatttcatttatcgcggacaggaaatgggattccaatacgaactcagtgaacagttcgctaaaagtctgggactgaaactcagaatcgaggtagccagaaatgtccgtgaattgattcagaaattacagtcaggcgaaggagatatgatcgcctacaacctgccgattaccaaagaatggaaagacagccttttgtattgcggagaagacataatcacccatcaggttatcgtccagcaaggaaatggaaagcataaaccattgaaagatgtaacggaacttatcggcaaagatatatatgtcaaaccaggcaaatattacgatcgcctcgtgaatctgaacaacgaactgggaggtggtatccatattcataagataacgggagatagcgttaccgcggaagacttaatcacccaggtagcacaaggtaagattccctataccgtagccgataatgatttagccaaactgaataaaacttactatcccaatctgaatatcgatctttctatcagttttgaccagcgttcttcatgggctgtgcgaaaagacagtcccgaactggcagccgccgccacaaactggcataaagaaaacatgacctctcctgcctatacggcaagtatgaagcgttacttcgagaatagtaaaatgatgccacactcccccatcctttcacttaaagaaggaaaaatatcacattacgacgatttattcaagaaatacgcccaagagatcggatgggactggcgaatgctggcatccctcgcctatacagaatcaaactttgacacaacagccgtatcttgggcaggagccaaaggattgatgcaattgatgcctgccactgcacgcgcaatgggcgtacccgcaggtaaagaacaaaacccggaagaaagtataaaagcagccgttaaatacattgccgccacagaccgaagtttcaatatgatccctgacaaacaggaacggctcaacttcatactggcttcttacaatgccggcctaggacatatctacgacgccatggcattagcaaaaaaatacggaaagaataacctcgtatggaaagacaacgtcgaaaacttcatcctgctcaaaagcaatgaggaatacttcaccgatcctgtttgtaaaaatggatatttccgtggcatagaaacgttcaacttcgtacgtgatattcagtcccggttcgaatcgtacaaaaaaaagataaaataagtaataagtaataggtaataggtaataaccgtagcttatcaatagtgtatccgcacggcttattacctattacctattacttattacctatttattacttgtttctgcccgtcaaaaggctaaccacaacaatagccagtatagacaatggtaatgcaaagagaatagggtcaattaccggaaacggataagtctcaatcaatacatccttgccaaacaggaatttacatattcccattgcggcagcttctttctgatgaaggaatattagtgcaaaagcactgcctaaagttcctacccagagacttgccataactccctgtttcgtcgctttcttccagtacaatgcacaaaagtaggcaggaagaaatgcagcagcacagatacccatgaaaatagaagttccgcgggcgataatatcatgtggcagcatatagcaaataatatagctgaccaaaatagagaaaagtactcccaaacgaatcacatttgtcaatttgccacgagaacggggtttataagtaccataaatgtcagaaccaaccgatgctcccattgtgtggaactgagaactaagcgtagacatacttgcagaaaggatacagagcataaacaaagcggcaaaccagtccggcatagctttattgatgaaataaggaatgattttatcaatatcctgtatcacttccgtagcaacggctccttctgtcttcaagaagaaaagattgcttaatgcaccggcatgatagatagctcctaccgttataatcaggaaaaaacaaccgataaatacgccacgattcaactgtttgctactttctaccgtcataaaacgtaccaccaactgaggctgtgcaaggcaaccgattcctactcccaaaataagagaggtaaccaatgagtaccactgcggagaacctgtcacaggcattgcggtccatccctgatgccccaatgccttgaacttttccggaaccagaggggctatatttgtcaattccttgtttgcttccgtaaaacccatgccaagcacctgatacaaagagaacaacaggaacaacatacagccaaacatgataactgcctgtaaagcatccgtatacatcacccccttcattcctcccgcaatcacatacgcagcaatgactaacgtaaatatcagcagagatatattaaaatcaatctgaaaaatctgttcaataaatacagcgccccctttcattaccacagcagcgtacaacggcatacctataaatatgacggctgcaatgaacacctgtatattacgggaacgaaaatgacggcctaataactgcggaaaagtgctgacattcagttttgctcccatgcgccgcgtacgcaagccgaagaatatgaaggcgataactaccccgacaaacatattgaggaaacacagccactgaatacccataccgaaagcagccgctactccgccaaaaccaactatagcagacgcagagataaacgtagcaccataagaaagcgccatcactatcggattcatctgacgtccgccaaccagataatcactggtattcgtagtcttcttatatcctaaaaaaccgaggtaggccaatgacagcagataagctatcacaatcaagccaagagtaaatgtattcatcgcgtttcgtctttatcgtcgtccttattccaatatttcagcccaaaccaggcagcaaaaatcacacatatcactgagaggatatatggcaagactataaaagggtcatctattccaaacatttgcgtatcagattttaatcaattaagccacaaatgtaaggaatttattgaaaagacaaaacttttgtttactaatactgattataatgtatctttttctcgtcatatttctgtttcggctgctcttttgttgcaggatagccgaaaggaatgacacaaagaggaagaatattctcgggcaggtgggtatatttgcgaacgacttccatacgatcttcatacggataagcagctgtccatacagcacccagccccatactttcagcagccagcaaaatattctgtgctgcagcagaacagtctaaataccaataaaaagaacgggcagaatcaccacagacaataatcgcattacgggcttgtgtcaacattttggcataaggaagagccgccgccatcgaatccagtttcgcacggtcggaaacaaccacaaactcccagggacgaacatcctttcccgatggagcagacattccagcacgaagcattaaatcaattttctctttctctacacctttattcaagtaagtacgcacactcttacgctcaaagatattatccaaagcggcatttccggtgccggttgttcctttttcctcttttgaggaagaacacgagatcatagcagtcattgccatgaacatacacaagaaagaaaaaatctttttcattgtgacaagtctttaaaataggtttaacttatttttctgggcttcttccaacgatactgtttcacggcgtaatagtccgctcttctcacgaagtgcctgatattctgcatctaactcattaatcagttcggctttcatctgcgaattcaacagccgggaagcaacactggcattctgagaagcatctttcagatgtacaaccggtgcatgatatacaggtgcgattttcagtgccgtatgcatctttgaagtagtggctccgccaatcaacagaggaatatccagtccggctttctccagttcggcagccacatgagtcatttcttccagagaaggtgtgatcaagccactcaaaccgatcatatcgactttttcttcgatggcacgctgaacaatggtttctgccggaaccatcactcccaagtcaactatatcataaccgttgcacgccattacgacggcaactatattttttccgatgtcgtgcacatccccttttacggtggcaagcagaacttttccggcagaagatgatccttccactttttctgattcaatgatcggttgcagtatagctacggctttcttcatagtacgggcagtcttcacgacctgaggcaggaacatttttcctgcgccaaaaagctcgccgacataattcattccatccatcaacggaccttcaattacatctacagctttatcatataaaggtaaagcttccgctaaatcctgttccagataatcaccgattcccttcatcaaagcatatttcaaacgctcttgtacggattcttctctccatgcatcctgcttcacagctgcctgaccggaagtaccgcccatcgtttctttcaatgcttccgccagttctatcagacgctcggcagcatcgggacgacgattcaatacaacgtcctctatcttttccagcgtatctgcaggaatatcactgtagagtacggaagttcccggattgacgattcccatatccatcccttgctggatggcatgataaaggaataccgcatgcattgcttcacgaatataattattgccacggaaagagaaagaaagattactcactccgccgctgacgtgtgcaccgggaagattcttcctgatccatccggtagcttctataaagtctacggcgtaattgttatgctcttcgattcctgtagccaccgcaagcacattcgggtcgaaaataatatcatgaggattgaatccaactttatcaaccagcagacgatatgcacgttcgcacacttctatcttgcgggcagcagtatccgcctgtcctttttcatcaaaagccatcacgacagttgccgctccatattgcttgatgatccgggcatgctccagaaatacttcctccccttccttcagagagatcgagtttacgattgatttgccttgcaggcatttcaatccggcttcgatcacttcccatttggaagagtcgatcataacaggtacacgggctatttccggttcggacatgatgagattcagaaaagtagtcatctcagtccgggcatccagcagaccatcatccatattaacgtcaataaccaaagctccgtcttctacttgctgacgagctatggaaagggcttcatcatatttcttttcattaaccagacgaagaaacttgcgtgagcctgctacgttgcaacgctcacctatattcacaaagttgatttccggtttcacttccagcagttcgagtccggaaagccacatacaatccggtttgggtgccggaacatgaggtttggcacctgctatcagtgtctgatattctgcaatgtaggcatctgtcgtaccacaacaaccaccgataatattaaccaatccttcctgaatatactccttcacttcatgagccatatctgcgggagtctgatcatatttccccagactattcggaaggcccgcattaggataagcactgatataataaggtgcacgcgaagccaactgttcaagaaaaggcttcaactgacgggcaccaaaggagcaattcaatccgactgaaaatatattggcatgctgcacagaagcaaggaaagcttccaaagtctgtccggacaatgtacgtccgccgatatcggataccgtcacagacaacataacagggacttctattcctgtcaccttcatagcctgtccggctgcaaagatggcagctttcgcattcagcgtatcaaatatggtttcgataagaatggcatccaccccaccttccagcatggcttccatttgctgctggtaagaggtagccagttcgtcataagacaaggcacgaaacgccggattgttcacatccgggctcatagaacaggttttattagtaggtccaacggagcctgcaacaaaacgcggtttatccggattctttgccgtatattcgtccgccagttcacgtgccagtctggtagcggcaagattgatttcgcgcacatattcctctacatgataatccgccattgagacagttgtagaactgaatgtattggtctcgataatatccgcacctgcttccaggtatttacgatggatatcttgaatgacatcggggcgagtcagacacaacaaatcattattccccttcaactgaccgggaatatgcgcaaaacgttcaccacgaaaatcttcttctttaagattatattgttggatcattgtgcccattgcgccatccagaatcagaatacgctcggatacaatctgagaaattgtctttttcattcttaccttattacattaacacctaattgtcactctgcctatcttagacctatcacgatcttatcttactattacgctataaagccatcttatcgcttaaacattcgggccatgtctctacggtcatctttttctttaattgattcccgtttatcgtactgttttttacctttcgccaaagcaacgaccagtttcgccaaacctttttcgttgataaacaaacgcacaggaacggtagtaaaaccggggtctttcattccccgttgaattttctccaattctttcttattaagcaacaactttctgtctctacgagctgtatgattattgtacgaaccatagaagtactcggcgatatgcatattctttacccataattcgcctttcgcaaaataacaaaacgtatccaccagacttgcttttcctaaacgaatggatttaatttccgtgcctgtcaatacgatacctgccgtgtaggtatccatcaactcataatcaaatgtagcacgtttattcttgatatttacagaaggttgtttcatctttacacattaattaagtatggctatcaacttactaaatacaatttgaatcaccgtcggacatagtattaacaaaactgatgagaaaagggtgtatttcaatcgtactttttcctccacttgcatcaatatgggagctccttcccatactacatagacaatgtagaactgaaatagccaggcaataattctaaaatcaggcaaaagtccggtcacaatctgaagcaagaagggaacaacaagtgcgtatccggcaaactgttgtgtcaacggagcattggcaggcataccaaacattcttactcccatttcgttaattgcataggccgccagaaagtaaccaccaaacaatgccacagctacggcacaacaattggtcatagctatttgaaaactttgcggtcctccccatccattcgtcagcaaagagccgataaagacggacaaaccgcataaaccaatcataggatagacaaaagccataaaaacttttcgcctatcctcttccatagaaatttcctcccaggccttggccggagaggaaatcaatttcattgctatattaaataattctttgtagttcaatgttattctttaaacggatattcatactcagctgaagtttcaccattttctgtcttcagtttatcttccgacgtattagtttcagctttcaatattatgtattgtggcaatttaccactcttctctttaaactgataaagtgcattacttatcgaataagctctataagcataagtccaattattacgatctaccttatccgtgtcattaatacgatggctaatatgcaaagttaatcttgtatcaccttcttttatttcttcaggatcataataaagagagaatgaatgtttattaacttccgattcttcaacagtagaccctgttactttcacccaatatgacattgtcagaacgatcgtatttttgtcaaaatagtctaaattagatcgttgtttgtccaatgtataaagaggatttgtaggttctattttttgtgaagttaaagactctcctgattttgggtcaatgcaaacagggttacctattaaagttacaggaatactagtggtattattcgtcacttgtgatcggtcatattgacaagaaattatatacatagttccactcaatactcccaattcactgtttggcaccaacttagtaactccatctcccatcagaaatgaggtataattatacttaactggaacagtcatcgttactgtattattatcatctcctttcaaacaagaagtaacagacatccccattaaaaccgtcattaaagctaccagtaaaaatttcatttgtttcataaacatattttttagagtttgcaaagatataaattctaattcataattagtaaatgcaaagacttaaaaaatactgcatcacaattttcttttttttcaaaaattcagcagtcacatattccaaaggaataagactatcagataacaaatacaaaaaaagtctactttctagtataaaatgctatatccaagttatataaaaataggaagagctgtttgtataccatacataactctccctataacaaaagctcattacaccactatttcttcaattttatagttttaataattttcccttcctgcgataatttgagtttagattcctgtacaatgacgccattccactttcctttcaaataaatatctttacctgaatttataccatgcaattttgcaacataggtcatagtagctatatatttagtagcaatcatctcagcttttattgtagtatgtgctggtacttcctgcgatatagtttcagaaacagtataagtttgagtctcttttttacctacagtataactccatgaagcttctgttgttgtttctcccgtaaaacttccatctttaaactctggaatatcaactttaaaatccatagatattttatctgtaattttcaatccaaccatttctgaaaaagtagactcacatgaagctgatccttgaaagacaagtgttctcgtagtcggtatatctgtatcatttatcaaccattttacatcaatttgtttaggttcaacagacaacttatcatctgttgttaattcataactaatattttctattcgaaattcatccacaggtattatttcccatttaatttcgtcccctttataatatttatcatcaataataatatcattactagttatactagcaggttgcacatacatttttatcgtttgaggatcaattggagttccaaaaggaggcattccaccttcaggaagtgtagtgaaataatagctatattgatcaaatgccgaaaagttaaccgtaccttgatcaaatatagtttcacccacaaaaagtccatagctaccttcaaaatatccagacgctatcataggagaattaatattgttgaatctatacaatgaagatactttaaaaggaacgaacggggcataagacactttaacattccacctttgccggagactaccatcatcctcatctactagccccagcttgccattatcagacacaacacttaaatatttcttagaataaactgatttgatattaacaggaatgccatcaagttgttctattggacgggtaagatcactagagttccttgttaaaggaacttcattctcattattatcagtactaatttctgataatgtattctcttgttcacatgaaaaaagaactagcatcaaactaagtaaaaacataatctttttcataatagtgtttttttaaagttaaacaatatgactaactactcattaacaaaaaaatctccatatccactataaagttctgaagtaatcattatttgataacgacctgcattttttataaagacttctactgtttcacccgtcacagcatcgtaatcatccgacaaaacaaattcattcgtatccaaatttaaaatttggacgaacacagtccctattgatttcttccaatcaatagacaatacattaccatatatacatatatatacaggagaataattaggagaacgaaatattggaactccagtagtacctttcactggcacctctcttttcactttcgattggcctaaaagaattacttcataaagaggtgtaaaagatgaagtaaagatgaagactagtaacaaaagaaataactttttcataacttttcgatattgattagaatgctcaaatgtaagaagaaagcatataaaatcaaaagaaaagactcagagttttatgttaaaaccctgagtcaaaaatagcagataaaccattaataataaaacacataactaaatagcattattatattcataagaataccagcaaataaaagaagatagtatatcataaagaattcagataatcttctaaagaatgcgtattatatatatcaggaagttttaaaagtatagaattacgccttttatacatagcatccaatgtacgatcaaaaaccaaagctatttctaaatagctaagttcaatcttaaaaagacagcaaaaacgaatatcctgattcgtgagtaagctagcttgtgcttttaatttgtctacgaaaccattcgaaaaataatttatatcctgtaataacgactcccaatctttctccaaaaacacatccttacatctttgattattttttttcttttgaagcaacaacaataacgtcttataacttttcgaattgcccaacaactttagaaaatattctctattatcttttttcaataaaagcacttgatttgtcaatatatacagtcgagctttatcttgttctatattacctgcaaactcttgaagaagcttcatttcttgctcctttttccttaaattatcttgcatgacagacaacaattcaacttctctctccaaagcatcctttttgtttgtcaacatcctaatcttatcacaatacctataccttctatttatccaataaattatcaataagcacacgcatatcaaaagtccataagtacaatatctataatcattcaaaagcttatgatatttcccccaatatatccatctattccctttcaaaatagcggtttgtgtgtttgcccctttcaattttaaagaatcaagacacctgatataataattttgaaaataaagggctttatttacatccccttccctttcctttatatcggtcaatagcaaataccctgccgccttcgtatacaaatcattagtattcattccttttaatacataaaatgctgcagaatcatacttttccaaatttgcaaaagcattgccttgcaacaaaaataatcttgcagaacttaaagaatcctctgcacaaactaatcctttctttgtatactcaaaactttcttgaggagaatctattgaagcataaaaagcagctatcgaattatatacaatcctctgcgcattttcattatgtatattttcagcaataactaaagcacgttcaaaataatccattgctgcagaatactttttactttgcaaacgaatatttcctcgtgctattaacgccatagataaattaaaagaatcattcttctgtacagcaatatcagaggacaagacaaaaagagaatctgccttatttagcatatcttgttgataataaatctgccctaaattcccataaagcaagcaaagcagatctttgttaccactcttttctgcgaaaggcaatgatacaagaaattcacgcacagccgcagcttcattttgcaagtcttggtaaacccgtcctaaataataatgagactttgccgataaatcagtatcttgaattgaatcatagtaacatactgcaatattaatcaatgaatcactcgtgtgtaaaatgtaatttttatcctctgcttgtgttaataataaagcatatttagctttttccgctacctctgcattatccatattttgacctttcaacaataataatgctgaatcgggattatttaccatcaaagaatccacttttaccagaaaggtgtttttttcttctttagtattacaaaaaacaattaaagcaacaaatgccaacaataacaaagaaaatatatagatcaatatttttatcaatgtattctttactttattatttttgcaaaaagttccaggtgctcgtctacataccttgctaccagcgcagtaacctgttcctccatatctaaatatgcctcttccaaatcatcaaaagcctcatattgctcatacattgccatgaattcatcgtctgtccgttccttttccagatccttccggttggcatcatatatcttcttggctttatataccaatttagagaactcttccgccccccacagacgcataaccttggcaaaaggattatcaaagatatatccgccataaccgttctgaatcaactgacagaatccgccgaacattatttcatcacgaaaaatctgataagccagcaatgaatgctgttcacctgtcaacaacggcattgtgtcagcagtcaattcaccaccgattacttccttatatttatcagtaaatacctggataaattcatccattccttcgcccgcagctttctgtaaagcggactccataacttctatcatagctttgttcaataaattattcagcaaagctactaattttattctatatctatctagtaataccgctacattctcactaaaacatacctgttggcggaattaatttaattcaaacccataaaaacagggtatctcattctgctttccgatatccgccagataattgcataccgatatactttccctttcccggaaaaccctttaagcacatttcttttaccgttcaatagtatgcaaacaaccctataataacctgctttacaactattattgtcgcattttcaaagggagttcttcatcgttccacccaggtgaacaagcatgtccacctaggtgcgcagacctgtttacaagggtgcaacgatcggttcacccgggtggaacgatgaagatgtcggtaaaataacacacgaataaaggcatcaaatgccatagagataagtaacataatatataaacaacaagtaaacagcaaccaagatgctagatgtattcggcaactacttacgcaaaggacaaagaaatggaatgagagataccccaaaaaagagtgagagatagactgaaatgaagcgattctagggagaaaatgatgagagatacctatttgaaaagtatctctcattctgtaatatactaattatatgcagattacacaaaaaaagtgagaccgtgagactaaaatatttttttctttgcaagggttagctgaaagaaggaactcttttaagtctatctaatgcaaaaacatataactatttatgcatgtaaatgcattcctatagccatacctattaaataaggtattaaccaaatgcaccaaacgacgatactaaaacgattaaaatgccttttcgcctcggcagatcccttcacataagtccatatcgcccatgaagcatgtacaaacatcagaagaatggcaatcgtccccgttaccgtgtggatttcatcatgcaaatgcgttaattcggcaatatgctccatcaggctggtcccgactgcatcggacaccaatcctaaaagaaagaaaataatatgccataacttcagtttcttttgcagcctttctccccatacaccgatagtataaaataccaatgcagatgaaataacgcagattgccgctattaaataatgtatatctacctgattcagttccataaaatttatatttcagataacaacaaagcaacgaatagatagttcgacgcatagcaatctttcacaaatgcaatcccgacttagcaaacgaagaaaaaacgtaaacggatttgtcacttttcacaaaaaagtaagatatggcgatttgcagaaacaaataaatcgactacctttgtgggcgatttagagaatcgtgactacgtatttttaattatatcactaaaaaaaagagctaattatgacttattcacacgaagtggaacacatgtgtgttgtaaagaagggtcctaaccacggaccggctcccatacccgaagaaggcaaatgggtaaaatctaaagaaatcgttgatatttcaggtttgacacacggtatcggttggtgtgctcctcagcagggtgcttgtaaactgacactgaatgttaaagaaggcgttatccaggaagctttagttgagactatcggatgttccggtatgactcactcagctgctatggctgctgaaatccttccgggtaaaacaatcctcgaagcactgaacactgaccttgtttgcgacgcaatcaacacagctatgcgcgaactcttcctgcaaatcgtttacggacgcactcagtctgctttctctgaaggtggtttgattatcggtgcaggtctggaagacttaggtaaaggtctgcgcagccaggtaggtaccctttatggtactttggctaaaggtcctcgttaccttgaaatggctgaaggttacatcaaaaatatcttcttggataagaatgatgaaatctgtggatacgaattcgttcacatgggtaaattcatggatgaaatcaagaagggaactgatgctaacgaagcattgaagaaagttacaggtacttatggtcgtgtaacagcagaacagggagcagttaaacacattgatccacgtcacgaataatataaggaggaaagaaactatgattagagaagtaaaattcgaaagccaagaccgtcgtatcaaaggtatcattgaagccttgaacgctaacggcatcaaagacatcgaagaagctaacgcaatctgcgaagctgccggacttgatccttataaaacgtgtgaagaaactcagcctatctgttttgaaaacgcaaaatgggcttatgtggtaggtactgcaattgctcttaagaagaactgcacaaacgctgctgaagctgctgaagctatcggtatcggtttgcaggcattctgtatcccgggttctgtagctgacgaccgtaaggttggtatcggtcatggtaacctggctgctatgttgcttcgcgaagaaactaaatgtttcgcattccttgcaggtcacgaatctttcgctgctgctgaaggtgctatcaaaatcgctgcaaaagcagacaaagtacgtaaagagccattgcgttgcatcctgaacggtcttggaaaagacgctgctcagatcatctctcgtatcaatggttttacttatgttcagactcagtttgattatttcactggtgagctgaaagtagttcgcgaaatcgcttactctgacggtcctcgtgcaaaagtaaaatgctacggtgctgacgatgttcgcgaaggtgtagctatcatgtggaaagaaggcgtagacgtatctatcacaggtaactctactaacccgactcgtttccaacacccggttgccggtacttataagaaagaacgtgtattggctggtaagccatacttctcagttgcttccggtggtggtacaggccgtactcttcaccccgataacatggcagctggtccggcttcttatggtatgacagatacgatgggtcgtatgcactctgatgcacagttcgctggttcttcatcagttcctgctcacgtagaaatgatgggattcctaggaattggtaacaatcctatggtaggttgtacagtagcttgtgctgttgacgtagctcaggctttggctaagtaattaaagttacattatataaataaactcctgtagtccatgtgattacaggagttttttatttgtggtaatttgaagtagatggtagttttagataccttatctcacctatcatttagaattgttgaatgatagatttatatacaatgaatagctacatttacataaaatcataatcaaaagaagcagcaggaacgcttgaagcagcaggaacgcttgaaccagcagaaagctatgagagagggcaaatcgaagaattaatatcttttgccaactcaaatcatttatgaataactattatagtattgattaataacagattgctatagtttacaagaagccgaaataataggattcttgggaattggtaacaccccaatggtaagttgcactgtggcttgcgctgtagacgtagctcaggccttagctaagtaataaaagttacttattattatacaggagagaattttttataaggcactctcctatttttataaaaaagatgatgattgttacaaataatctacactatcgttgtttagttctctacaacaaattcttaccatgaaccagcttataacatatctttgcaatgagataataatatccataaattattaaaaagagaagaggatataaagagagaattttagaaaataaagaattacataaaataaactctcgaaaataatccagtatgacacacatcggacaaattattgaaaaagagctccatcgccaagaacgctcggtcacatggttcgcaagacgactctattgcgatcgaactaatgtatataatatatttagaagacagagcttagatacagaactgttgttacgtatatccattatattagaatacaatttcttccaaatatattctgatatatataacaacagaacatagaaatatcttctacaaccttgtatataaaacagcaacaattaaaaggatatttatgtttaaagagcatgtatctttgcaaagttttttaagacaaccaaagtatatgactaaaaagattacacattaaaaacaaaaaagatgaaacaatttagaattttaagtatgttgatgattgtgcttatatcaagcctgtcatttgtatcatgtggagatgatgatgatgaaacgtctggtgatttcagtgccagcatagcaggagtttatacaggtaaactcaaagttggaactaatgttacagctgatgcatatgtagtcactgtcaccaaagtatcttcttctgtagtaaaagttaccgctgacttctacacagataacggtagtgaaaattacaatgttactaaagaaggcaatcaatacattctttcaagcgaaagctcatctggtatcaacataactgttacaggtaaagcaatgactataagtttccttaataatgcaggaagtatgaccacttttaccggaactcgtgactaaagcccaccaatctttacagtaaaagtagaaattcagtaaaggttacaaatatcccaaagccgtaatttcccttttcttgaaaatgagaaattacggcttttataaataaaagctatgaaaattgtatataacactattctctttacattactatttctagccacaagctgtgatcattcggagaaaatcgatgatataaaacttgaaatttcacaaaacatcttccgcaacatcgacaataacggagggaaaataactgttgctatcacatctaattctgaatggatcatcgcaaattcagctgattggtgcataccagacaaatatcaaggagaaggaaacgatatacttactataaaaattctagctaacaccaaacatgcaaacagacaaactaatctaatcatatccgcccaagggataaaccaaacaatcaagatttcacaacaaaaaggagaagttaatccagatttagataaaatacactatcaattacccgttattttccatgttctttatcaaaacgaaaatgacataaatcaatatataaaagaagaccatttaaaagatgtattagtgcgagctaaccatttctatcaatctgaaaagtgtggaattgatataaatctcgaatttgtattagcaaccaaagataagaatggaaccacattaccagaacctggagtagaaagagtgccatttaatgagcttcctattgattgcgaaaagtttatgagagataatacaggaaaatatacatctttactatgggaacccaatgaatacattaacataatggtatatccttttacggattcgcagattttaggcatatctacatttccatatagtttaaagaacttttttttagaagggactcaacaggtatcagcttcgtggatcactttagagaatttgagtttcccatattgtatatcgatcaatagttcatatatttatgagcaaagtacagatgaaagaattaatcaaaacgatgctgcaataacattagcacacgaactcggacactatttaggattacgtcatgtattctcagaaggagggaccacttcaatgtgtaccgatactgattattgcaaagatactcccagttataaccgtagtgagtatgaacaatggcttaacaatttggataagcagaataaatatcaattaaaagatttagctaaacgatatagctgtgaaaaaggagaatatgaagcacacaacattatggactatgcatattgcttttataatgaaataactttagaacaacgaaaaagaatacgccatatcttaaactatagcccactgattccaggtcccaaagaaagcagaatagataccagaggcgtacaaggcagattgaatttgccaatatgtataatgaaataacataatcaggtaaaacggggcagcaagtatttcatcgattgttcctccatagtagtcaaatgtcagaacaagtcttgactattacaactaattatccgttttctacatcacaatacaaaacttttatacaggataacttgttattacaatataaccaaacatcatgaaacgatgctactgacatttttaaacatactggccaccatcattggcgtaatcagtttattgattgtaacctatggagtattcgtaggattcatcgcttttctccgtaacgaattcaaacggatcaacggaacctataccatcaataatgtccggcagctgagagctgatttcggcagttacctcttattgggattagaatttctaattgcatcagacatactaaagaccgtagtagacccgactttagacgaactggctattttaggaggtgtagttatagtaagaactgtattatcagtctttctgaataaagaaataaaagaactagccgaagaagaaaattcaaaaagcacataaatagattggaataaataaaaaatgtattacttttgcatgaattcttaatgacctatggtatggaatatatcaatgaatttcacaatgactgaaattccaaagaatataaaggacacgatatgaaaaagaacttactattattactttgcttgttttgtctggtcaatgtttgccatgcaaaagcgaaagacacttttaccgttttccaattaaacctgtggcatggatgtactaaagtacccaacggagatcaaggcattattgatgtactggatcagatggatgcggatgtcgtttttctgtgcgaaatcagagacggaaaacagtttatccctcatgtgatcgaagagctggagaagagaggaaaacattactatggtgaaacgtttgatcttgcaatcggtgttttgagtaaattcaagccggacagttggaccaaatgctgcatcgtacctggtgacgaaggtcgtgctatggtgaaaatggttgcaacaatcgaaggccaacccgtatctttctattcttgtcatttggactaccggcattatcaatgctatatgccacgtggatataatggtactacctggaagaaaatggataagccgataacggatgaagaagaagtcttgaaagcaaacagacagtctttccgggatgaaaccatccgtgcttttattcaggaagtacaatctgacattcaacaaggccgcccgataatcatgggaggagattttaatgagccctctcatttagactggcaggcagatacaaaggatttgtgggatcataatggggctgtcattcattgggactgctcaatgatgttgagcaaagcaggattcaaagatacatatcgcgaaaaatatcccaatacagttcgatatcccggttttacattcccagccggaaacaaactcgcagaagaggctaaactggaaaagttggcttgggcgcctgaggcagacgaacgtgaccggattgatttcatttattattatccattggagtcgatgctttccatgaagaatagcaagttggtaggtccctccgaaacagttgtccggggaaaaataacagaaaacgattctaaagataagattctgacgccttcttgtatttggcccagcgaccataaaggtaatcttgctacatttaagattcggaagaaacggtaatagtatattgagtagggtgactttcatcgtgcgtcaccctaaaattccaaagcttcaaatcagagaattctcttcctgctctatcatcttatcataatacgcaatgcgtgcggcacactcccgaatagtcacctcgcgcaatgcttccgttcgtgccagcatatattcgtattgttcttcactgacagtgaatagtcggttgtaccgagcttcgatatacgcccgacataatttatcgaacgcttctctatcttcgggagtattaactggaaatacattcgcgaaacctcgtgaacggcttttagccatcgggcccaacacttccaatttatgggatttagggcgagtgccactatggacaagcatatacgtcttgtagtaacgttcgcaagcttgatgtaaaaagaatgaacctaatttatattctttttccacttgagccaattttccatgtcttaataatccctctgccatgtcgaaacatcctgcatattcttcctccgcatattgcttaatttcccgatacggcaacttctccggtttgccaatctgaaacgtgccgtcgtcatataatagaatgccatcttttatgatctcataaaaaaaataatgttttcttcttatagcccgattaacggtcgtcgtgctttcaacaatgatctgaggtggtgcaggatgtctccttccttccattcgtttatcatacttaggaacgacaaaggcgttcgcatgattctctgctttaacagcatcgcccgtatcacatatcaccagaatatcaaggtcgctttggtagtaagtaagtccacctcgttcgtcgtatgtttcatcccaaatgacatattctccacgtgcataactcccatagaggataatcatacgtacattcacaaggtactgcaatatcagttcttgcagcactgccaactcttcctgtgtgcgtttgggcaaacgctttattgatcttttcataatgacaatcatctattcttaaccgcaaagataacttaaatcagtgtattaatgattgtattgaaacgcttttttcaagactttgatagtgtgttatactaagaaatggcatgtctgctatttttcattccattgattctagtacttactcccatcaactcttgtacttcatcttgcagtttctcgtacttcatacttccaactcaagtacttcaaactctcaactccagtactttacttcttacattcttgtacatcattttccctcttcaagtacttcaatcgttacactcctctgcctcatttcctttcacttttcgttcttttctctttgcatttctgctctttcacactcacatatgtatactatttgcaccattaaaaagtcctttattccctactgacactgacaactgccactttagcgtttctttagtaataacatttcttttttcgtttgcatacattactaattatcaacacattataaacatctaaaatattaatttcatacacaccctgtcagtatggaacatttagtggcagtacttttccattcattcatttgtaaatatatacactacaacaaatatgaataaccggacgaaggtaggaatacaaattcaacagcgttgaataggcttctttcttccagtgatgacaaagttattagtaaactatgattaattcaagtttcgcaagttacttttgcgttatccaaactatcttaattcccctccctcctggtaggagacttaagatactaccgactttttagtcactcccaattgagatactactgtttgtcaataatataaagaatttgcggaacttcagtgattaagagttatttaaaggcattttaatttacatactcatccattcctcttggatgtattctctgtaaagaggccttaaggtgtcagttgtcagtagtgtcagtagatttacttttctgtagggatagcacaacaattaaaatcctgataatcaatcaagagatcatcttttttattttttcagtcttctgccgttccaccctgcatttactgacataaaaattgttaatctcccggggaatatcgtaaatatatgatacaaacaagtttttcaccagtctataagaatgaaaacaaataatagaaaaagccagattaaaccatctgttgatttgcaacaaatgagctatcgttcattcccggacaacttatcgattaagacagcatcgatatcttttgccaattcttgataggtcgccaaaggatcatctgtatatacagcacgaataatcccctccttgtctgttatcaatatacggggaatggtatgggaagcaaaaagcgaaaagacagcatcatcattctgagcggaaaaaggcaaggtaaacgaatgtttttcccaataggcttgtacttcagagcccgattctgaacggctgatacaagacaataatacatccggattctctttatacgtatcataaactttctgaataaccggaagttctttctgacaatccggacaatccgtatgaaaaaagacaatcactccaaccttcccgctaaatgactgcgtattcaacactcccccatcactcatctctaccgaaaactgaggaagggcgtcaccggcaacaagagcaaagtctcccctatcatcatcatcgtccgtgatacaggaagaaaaaactgccagaacgatacatagcaatatcaccactttgcttcttatttccactttcatatctttcttcgttagttatgcaactcccaaaagctctacctcaaataccaatgtcgaaaaagccggaatcggaccggatgcacgggttccgtatcccatcgtgtaaggtatatagatgatccatttatctcccgcacgcatccgttggagcgccagttgccaaccatctattacatcgcagaggcggaaagcttccggacaattacgttcataagaattatcgaacacccgaccgttaatcagactccctttataatgaacggtaacaatactccgcacattaggaaaaacagtccccgtaccggtctccaaaaccttataatagatgccgcaaggcaaggcataaacaccttcctgcgatgacaattctttcaagaactccaaattcgtctctttatattcttgctttcttcccataaatacatgatttgaatgtacaaaagtaagcagatttaagagaaatcttccataaaaactgtatatttgtttgttgaatcataaaaactcatcgctatgggacaaattaaaaccagatgcagcgctgctgccggactattcttgattcttttgacagtaattgcgggattttcgtcctgtaaaagtaatcagaaagacattattccttctgccgaatacgctccatacgtcaatgcttatacgggaggagtgatttcgcaaaactcaacgatacgcatagagctgacacaggaccagccgatggtagacctgaatcaggaactgaaagacaatccgttcagtttctctccttcattgaaaggaaaaacgtattgggtcagcaacaataccattgaatttgtccccgaagaaggggcactgaaaccaggtgccttttacgaaggaaccttccacctgggagatttcgtcgatgtagacaaaaagctggaagaattcaacttctctttccgcgtgcaggaacgaaactttagtattcataccgatccgataaccgtcacagccacccagcccgaccaagtgaccgtaacgggtgaaatacgtttcagcgatgtagtgaaaaaagaggaagtagagaaaatgctcacagccggaagcgaaaagaacaaaagctatccgattgaaatcacccagacagatcacccgacccgatacgcatttagcatcagtcagataatcaaagaagcggaagattaccaactggaaattaccgccaaaggcaatccggcaggcatcgaccgtacccaaaacgaaagtattctgatcccggcaaagaacagtttccgcttcctgtccgccgtacgcatcgaccaaccggaaaacggaattgaaatcatattctccgaccctgtatccaacacacaggacttgaaagggctcatcgacgttccggaagtttcttcctctattttccagatcaaagaaaataaagtattcgtttacttcgaaaccggcaaactgaacaaactgacgctgaatatccatgaaggaataagaaacagccaggacaaaccgctgggcacttcccactccatctcattcagcgaacttaacctgaaaccgcaggtagaaatggctacttccgccgctatcctgcccgattcgaaaagtctgatcatccccttccgtgccgtcaatctatatgcggtggatttgagcgtgatccgtattttcgaaaacaacgtattgatgttcatgcagaacaactcgctctcctcagccaatgaattgcgacgttcgggacgactggtttataagaagacattgtggctggcgaaagattcttccaaagatgtgcaccgctgggaagactattcgatagaccttgccggattgattcatcaggagccgggagccatttaccgtgtcatcctctcgttccgccaggaatactccgcttatccttgcgggggaagtgaaaacaaggaaatgcagttcgcggacaacaagtcttccgacaacctgaccaaagtcagcggagagacattgtcgggagacgatgaagcggtatgggacactccggaaacatactattattataacggcagcgtgccgatggactggagccagtaccgatggacagaacgggataatccctgccatccgtcctactatatgaattccgaccggatagctgcctgcaatatctttgcctccaatttgggaatgattgtgaaacgtaattcactgaataagttgtggattgcggtaaataacattctggatacgaagccggtagcgaaagcacaggtaacaatttacaacttccagctccagccgattggaaagggagagacgaacggtgaagggctggtagaaatcactccgaagggagttcctttcatagcggtagccgaagcggacaagcaaaaggcatatgtacgcgtggtcgatggcgaagagcagtcggtcagccggttcgatgtgggaggaaaagacattcagaaaggtctgaaaggatttatctatggcgagagaggcgtatggcgtccgggagatacactgcatatttccttcatgctggaagaccgtgagaaacgcattccggacaaacatccggtagcattggagatttacaatccaagaggacagttctataccaaaatgatctctacgcagggtacaaacggattttatacatttgccgtgcccacacaagccgacgatcccaccggattatggaatgcctacgtgaaagtaggaggaactgccttccacaagagtctgcgcatcgaaaccatcaagccgaaccgtctgaagattacactagctttaccaaccatccttcaggcttcgagcaaagacgtatatgccccgcttacttcttcatggctgacgggagccaccgcatcgcgactgaaagccaaggtcgaaatgtccttatcaaaggtcaatacgcagttcaagaactacgggcaatacctgttcaacaatccggcaacggactttacgaccgtccgggcggatgtgttcaacggggtactggatgcggaaggaagagcaggcgtcaatatacagcttccggtagcaacgggtgctccgggcatgctgaatgcaacgctcaccacccgtgttttcgaaccgggaggagatgcaagcatttactcgcagactgttcccttctctccgttcacatcgtatgtgggcatcaatctgaaccagccgaaaggaaagtatatcgaaacagacaaagatcatgtgtttgacatcgtgacggtcaacgatcagggacagccggtgaaccgttccaatctggaatataaaatctaccggatcagctggagctggtggtgggaaaacggtgaagagtctttcggaacctacatcaacaacagttccatcactcccgttgccagtggtaacctgcagaccacaggaggaaaagcctccttcaagttccgcatcaattatccggattggggacgctatctggtgtacgtgaaagaccgtgaaagcggacacgccaccggaggaaccgtctacatcgactggcccgactggcgcggacgttcaaacaagacagacccgagcggcatcaagatgcttgctttctcactggacaaagattcttatgagataggagaaacagccacggcaatcattcccgcagccgccggaggacgtgcgctggtatccctcgaaaacggttcgaccgtcttgcagcagcaatggctcgaagtgtccgatcagggagatacgaaactcaccttcaagattacaccggaaatggctccgaatgtttatctgcatatcagcctgttgcagcctcatgcgcagacagtcaatgatctgccgatccgtatgtacggcattgctccggtatttgtgaccaaccgtcagacgattctgcaaccgcagatcaagatgccggaagtgctgcgtccggaaactgactttaacgtgactgtcagcgagaaaagcggaaaaccgatgacttatacactggcgattgtggatgacggtctgctcgatctgactaacttcaagacgcccgacccgtggaacgagttttatgcacgcgaggctctcggcatccgtacatgggatatgtacgacgatgtgctgggtgcttccggcggacgttacagttcattgttcagcacaggtggagatgcctcgctgaaaccggcagatgccaaagccaaccgtttcaaaccggtggtcaaattcatcggtcctttctatctcgcaaaaggtaagcaacagacacatacgttgaagcttccgatgtatgtgggttctgtacgtgcgatggtagttgccggacaggacggcgcttacggaaatgcggaaaagactgcatttgtgcggacaccgctcatgctgttgtctactctgccccgtgtattgagtacgcaggaagaaattaccgttccggtaaatgtattcgctatggagaaccaagtgaagaacgtgaccgtatcgctggaagcatccggcgcaggcgtacagatcacgggcaatcgccagcagtcactcacttttgaccagccgggtgaccaactggcatacttcactctgaaaacaggcagcaaaaccggaaaggcaaccatccacctgacggcaagcggcaacggacagcagacaaaagaaacgatcgaaatagaagtccggaatccgaatccggtggttaccttacgcaacagccaatggatagaagccggtcaggaggccgaactgtcatacacactggcaggttcttcttcggctaacaatcaggtgcaactggaagtctcccgcattccgtcggtagacatcagccgtagattcgacttcttatacaactatcagcatcattgcacagagcaactgacttccaaagcattacctctcttattcgtctctcagttcaaggcggtggacgaacaggaagccgagaaaataaaggcgaatgtacaggaagctatccggcagatatatgcccgccagcttcccaacggcggatttgtatactggccgggcaacgccgtcgccgatgaatggatcacttcttacacgggtatgttcctgacactggcacaagaaaaagggtatgccgttcatccgaacgtactgaacaaatggaaacgcttccagcgtgccgccgcccaaaactggcgtatgccgcaggaagcaagtaactggcagatatggcaatcggaattgcagcaggccttccgcctctatacccttgcactggccggtgcaccggaatacggagccatgaaccgcatgaaggaacagccgggactctccatccaagccaaatggagactggcagccgcctatgcgctgaccggtaagatgaaacctgccggagaattagtatacaacgcagaaacgaccgtcattccttattcttccatgaacctgatttacggttcgtccgaccgggatgaagcaatgattctggaaacgctcattctgatgaagcgggatcgggatgcgttgcaacaggctaagaaggtatcacagaatctggcacaggaaaactggttcagcacgcagtctaccgcctttgccctgatggcaatgggacgccttgcggagcaattatccggtacactggatttcacatggagctggaacggcaagcaacagcccgccgtgaaatctgctaaagccgtatttgagaaggagatagctacttctccgaaatcgggaacagtctctgtgaagaatcaaggcaaaggagcattgagcgtagacctgattacacgtacccaattgctgaatgatacgctgccagccattgccgataatatccggctggatgtgaaatacacagatatggcaggttcaccgatttccgtggaagacatcagacagggaacggactttatgtctgcggtcaccctatccaatatcagcggtacttccgattacagcaatctggcactgacccatattataccgtccggatgggaaatatataatgaacggatgattgttccggaagcgtcctcttccaattctaatgaagcgaatactccggaaagttcagccgataagtacacctataaagatattcgtgatgaccgggtattgacttatttcgacctgcgacggggtgaatcgaaaacatttaccgtaaggttgcaggcaacttatgcaggtaactttattcttccggccattcagtgcgaagctatgtacgacgcagcggtacaggcacgcaccaaagcgggaagaacgactgtcagccgctgacaagactctgaacaataagacagcattgacagatagcataagtgcatgggaagcaaaatcttgaatttcttcaaacgattgtccgtcaccaaaaaagtaatactttgtattcttgcttttttggtgacaggatatatcttttgtcttccccgccacctttttcatgtcccctactccacagtagtgacggaccggaacgaggaactgctgggtgcacgcatcgcctccgacggtcaatggagattccctccccgaaacacgactccggaaaagatcaaggaatgcctcattactttcgaagacaaacatttctatcaccattggggagtcaatccgttcgctatcggaagagctttctatcagaatgtgaagaataaacgcatcgtaagcggaggcagtacgctgaccatgcagaccatccgcctggcacggaacgaatcgcgcaccttccgtgagaaactgattgaaatgatctgggccacccgcctggaatttcgcgcttccaaagaggagattctttccatgtatatctcccatgcccctttcgggggaaatgtagtgggactggatgccgccgcatggcgctacttcggacattctgccgatgacttatcgtgggcggagtctgccatgcttgccgttcttcccaacgcgcccgccatgattcatctgtccaaaggacggaaaacgttgcttgacaaacgaaaccgcctgctgaaacagcttctcgaaaagaaaaccatcgattcgtctacctacgaactggctatcagcgagccacttcccgacgagcctcatgcgctcccacaaatcgcaccgtacctggtcagccggttctatcaggaacgaaacggcgaatactcccgttcgaccatcaacaagggcattcagactcaggtagaggacctggcggaacgatggagtaacgaattcgggcgaagtgatattcgcaatctggccattctggtgattgacattccgagcaatcaagtggtggcatactgcggcaacgtccatttcgaccggaagcagggaggaaatcaagtagacgtcattcaggctccgagaagtacgggcagtattctcaaacctttcttatattacgcaatgttacaggaaggaagtttactgccggatatgttgctgccggacgtacctgtcaatatcaacggatttacgccacagaatttcagtatgcagttcgaaggagctgttcccgcttcggaagctctcgcgcgttcattaaatattcccgcagtcacgatgctgcaaagatacggagtcccgaagtttcatagcttcctgcaacagatcgggctaaaaacgatcaaccgttcttcttcccactatggtttatcacttattctgggaggagcggaagccactttatgggatgtaacaaacgcatatgcaatgatgggacgcagtttgttgcaactgccgcaaaggtcttgcagcctgttgctcccgacaagccgaatcacagaatcaaccgatccttttcagccaggcgccgtatggcagacattcgatgccttgaaagaagtcaaccgtcccgaagagattgactggaaatccattccttccatgcagaccattgcatggaaaaccggaacgagctacggattccgggatgcttgggcggtgggtgttacgccccgctatgcagtcggcgtatgggtaggaaatgccaccggagaaggaaaacccgggctggtaggtgcacagacagccggccccgtactattcgatatttttaatctgctcccctcctcttcgtggtttacacgtcctgcgggcatctttgtcgaagcagaggtctgccggaaatcgggacatctgaaaggacggttctgtgatgaaacggacacacttcttgttttaccggcaggactgcggacagaggcatgcccctatcaccatctcgtcactttatcagccgatgaaagccagcgtatttatgaaaattgcgccaacacggagcctacgcttcgaaaaagctggttcacactgccacccgtatgggaatggtattacaagcaacatcatccggagtataaaccgctgcctccttttaaagccggatgcggagaagatactttccagccgatgcaatttatatatcctccgatgaacgcacgcatcaaactgcccaagcaactggatggcagcaaaggtttcctgactgtagaactggcgcacaacaatcctaacgctaccgttttctggcatcttgacgagacctaccaagcgcagacacaggactttcacaaaatctccctgcaacccgccgccggcaaacattcgctgacggcagtagacggtgaaggaaataccatctccaccactttctttgttgagtgatattcattatctttgcggcatgaaacagtcattgaaagaaaacggaggtctgccggcatccatcctgtggacgctcgccattgtggcaggagtctcggtagccaacatctattatatccaaccgctgctaaatatgatacgccatgaacttggcatatcagaattccgtaccaacctgattgccatggtcacacagataggctatgcagcgggactcttgtttatcactcccttaggtgatttgtatcagcggaaaaagattatccttgtcaatttctttgtcctgatattctccctgctgacgattgctttggcagataatatccatctgatactccttgcttcgttcttcaccggagcctgctccatgattccgcagatattcattcccatagccgcccagttctcccgtccggaaaacaaaggcaggaatgtcgggatcgtcctatcgggcttgctgaccggaatcctttcttcacgggtggtcagcggattcgtcggcgaactgttcggatggcgcgaaatgtattacatcgccgcaaccatgatgttcgtctgcgcgattgtcgtgctcaaagtccttcccgatattcagaccaacttccggggcaagtacggcgacctgatgaaatccctgctggctttggtgaaagagtttccgcagctgcgcatttattccatccgtgcggcgttaaacttcggttcccttcttgccatgtggtcctgccttgccttcaagatggggcaagccccctttcatgccaacagcgacatcatcggtttgctgggattatgcggtgtggcgggagcattaaccgcctcctttgtggggaaatacgtaaagagagtgggtgtccgccgcttcaacttcatcggttgcggactgatcctcttttcatggctactcttcttcgtcggagaaaacacctaccttggtatcattctgggaattatcatcatcgacataggtatgcagtgcatccagctcagtaatcagaccagtatcttcgaactgtcaccccgagcctccaaccgcatcaatacaattttcatgacgacctacttcgtcggcggttccctgggaaccttccttgcgggtacattctggcaattgcacggatggcatggtgttattggaattggagctacactgacctgcatttctttactaattacaactttgtcgaagaagtgagtcaacaaaacggagcagtaaaccgtttaatacaaaaaagggaaacatgaaatacggagttaacaaagaaatcttacttatcacagcaggcaccgtctggattatcgccggtgccaatatcttgcgaataggcatcgttacatggcttaataactccgaaggctggatgttcaagataggagaagcaaccatcgtctttctgctgttcttcgtattaatcttcaaaagactctattacaagcatactcaaaggatcgaacggaaaaaggaacagaagaactgccctttctccttcttcgatgtcaaaagctggatcgtcatgatctttatgatctgtatgggcatcaccatccgcagcttccacctgttgcccgaaagttttatatctgtcttctacacaggactgtccatcgcactgatcctgaccggcgtactcttcatccgttactggtggctgaggcgcaagacgaatccggtgtaacaggaaagcatctatattccaataaaatataaacttataataaattttattgtgctgtccggcaaggcaaaaagaattctgtctttttattgtatctttgcgcgaccaaaaaaataaagaaatgattccaacccaacaggatattgccgaattcacccgctttcaacgaaacgagataacagaaagcatcttatatgaacggctcgcatctatcgaaaaagacgagaataaccgcaaaacgctccgactgatagcagcagaagaaaagtcgcattacgctatcctcaagaaatatacaggaaaagaaatcggtccggactataagcgtatcgcccgtttctactttctggcacgcatactaggtatcacattcgccatcaaattaatggagtccagtgaggaaaatgcccataataattatgataaatatgcccatataccggacctacaacggctggcacatgaagaagaagtgcacgagcaaaagttgatttcacttatcaatgaagaacggctggaatatatgggatcggtcgtactgggacttaatgatgcgctggttgagtttacaggtgcactggcaggtttcacacttgccttgagtgacagtaaactgatagcactgaccggcagtatcacagggatagccgctgcactgtcaatggcatcttccgaatatctttctaccaaatcggaaggggatgataagaaacatccggtaaaagcagctgtatatacaggaatcgcctatctgatcacggtagtgtcactggttactccgtttatactgatcagcaatgtaatcgtagctttgggagtgatgctgaccatggcacttatcatcattgcccttttcaactactattattccgtagcccgtggagaaagcttccgaaagcggtttacggaaatggctgtactcagtttcagtgtggcaggtatcagtttcctgataggatacgctctaaagacatttaccggaatcgatgcctgaaatcaataaagcatccgacatcattgaaggtccggtagttacataataaagaaacctaaaccaccagattaaataataaagcgttatatttagaatgaagaaagctccatctcccctcatatcactattgcccattgtcgtattagtgatattactattcgccaccattcgtgtatttggcagtgatgccctcaatggcggaagtcagatatcgctgcttactaccaccgccatttgtatccttatcggcatggctttctacaaaatcccctggaaagactacgaactggcaatcacgaacaacgtggcaggagtgacaacagccatcatcatcttactgattatcggcgcattaagcggtatctggatgattagcggagtagtgcccactttgatttattacgggatgcagattatccatcccagtttcttcctgacatccacctgtattatttgcgtattgatctccgttatgaccggaagttcatggacaacgatcgccaccatcggtattgctctcatgggcatcggaaaggcacagggatttgaagaaggctggattgcgggagctatcatttccggtgcctatttcggcgataaggtttctcccttgtccgagacgaccatattggcggcatccgtcacggacacgcccctcttccgtcatatccgctacatgatgattactacggtgccctcactgatcatcacactgactatatttacggtagcaggtctgtctcatgacgccagcaatacccagcacatcgcggaagtggcagctgccctgaacgaaaagttccatatcaccccgtggctgctgattataccgatagcaacaggcatattgattgcacggaaagtgccttccatcattaccctgtttctgtccactctattggcgggcattttcgctctgatcttccaaccggatttgttgcgggaaatttcgggggctgccgtttccaacttcgactccctgtttaaaggactgatgatgaccatctacggcaagacaagcctgcagaccgacaatgctgttttgacagatttaattgccacccgtggtatgtcgggaatgatgaataccatctggctgatattatgtgccatgtgtttcggcggggcaatgacagccagcggtatgctgggaagcatcacatcgctcttcgtacgtttcatgaagaaaacggtcagcgtcgtatcggctaccgtctgttcggggcttttcctcaatctggcaactgccgaccagtacatcagcatcatcctgactggtaatatgtttcgcgacatttatgctaaaaaaggttacgaaagctgcctgctcagccggaccaccgaggattcagtaaccgttacatccgtactgatcccatggaatacctgcggaatgacgcaggctaccattctgagtgtgcctacgctggtgtacctcccctattgctttttcaacattatcagtcctttaatgagtatcgctgtcgcagctatcggatataaaattgtaaaacgcccgtgaacaatctggcatacactttgtttttgcaataaacgaacaacgtattaaacctaaacaaaaaaaagttatgaaaaagtttattgcattattagcattagttttagtaagtgcgagcacaatgatgtatgcacaggaaagtaacgcagccatccgccgcgcagacagaaaagcagaaagagacgcagaaagagcaaaacttcgcgcagaagaacaggtacaggacatggcagcctaccagcaggctgtacaggctttgaagaacaaacagtttgttctggaagccaatcaggtgatcttccgtaacggtatgagttccttcgtgacttccaacactaacttcgtcctgatgaacggaaacagagccactgtacagacagcgttcaacactccttatcccggccctaacggtatcggtggtgtgactgtagacggtaactcttcggacatgaagatgaatatcgataagaaaggaaatgtaaactgttcattcagtgtacagggcatcggtatctcagctcaggtatttattaatatgagcagcggtaacaacaatgcttcggtatctatcagcccgaacttcaataacaacaacctgacattgaacggtaacatcgtcccactggatcagtcaaacatcttcaaaggacgtgcctggtaatccgaacagaagaatataagaataactccgctacaaatcgcgcaaaatgcgtacatttgtagcggagtttttttaattgatcattatgagggaatatatcatcgcagataatcaggatatcagcaaggcaggaatgatgtttctgctaagccggcaaaaggatgtatccgttcttttagaagctgacaacaaggccgaactgattcagcagctgcgcctgtatccgcaagcagtggttattctggattataccttattcgattttgccggagcggacgaactgatcgtcctgcaggagcggtttaaagaggccgactggattctgttctccgatgagttaagtatcaattttctccggcaggtattattcagcagtatggctttcggagtagtgatgaaagataactcaaaagaggaaatcatgtccgccctgcaatgcgcttcacgcaaacaacggtatatctgcaatcatgtcagcaatctgctgctttcgggaacggcttcttccgccgcatcccctgcaacggtggatgatcatctgctgacgcagacagaaaagaatatcctcaaagaaattgcactggggaagacgacaaaagaaatagcggcagaaaagaacctcagctttcatacaatcaacagccaccgaaagaatatcttccggaagctgggagtcaacaatgtgcacgaagctaccaagtacgcgatgcgtgcagggattgtggatttagcggaatactatatttgacagccggttcagttctgaaagggaacagcctatcgggttatctcaccacttcctacacatatccccgcttcttcatcataaatcaccccgaactgaccgggagcaatgccctgcaacttctcagaagataagatacggaactgaccgccctcttcctgtaccagctttcccttcgtaaattcaggagtgtgacgaattttgaaggtaatatctatctcctttccggcatctttccacggattctccgtaataaagtggaaatcattgatacggaactcactgccaaactgcgtttcgactccatatccatgagagacatagatgatattttcctcaacatccttcttgatcacaaaccagggaccgccactcaatccgagtcctttccgctgtccgatcgtatggaaccagtagccgcgatgcgtgcccactttctttccggtttccagttctataatcgccccttcccgctctcccaggaaacgacgaacgaaatcattatagttaatctttcccaaaaagcaaattccctgactgtcctttcttcgggcactgggcaatcctgccctgcttgcgatttcgcgtacttcctgcttcatcagtccgccgatagaaaacatcagtttggaaacttgcaggtagtctatctgggccaggaaatccgtctggtctttaacagggtctttggctgttccaagccacgtcttgccgtcctgccggatggtggtggcgtaatgccctgtcgccgtaaaatcgaaattctttccgacctgctgttcgaaacagccaaactttatgagtttgttacacatcacatccggattcggtgtcagtcctttctttattttatcaatcgcgtaggcggccacattctcccaatactccttatgcaaatccacgacttccaaggacaaaccatacttacgggcaatggcagtggacatttcaatatcttcttcggctgaacaatccatatactccgccccgtccatacctattttgatatagaaaagagtcggtttgtatccttgctcacaaagaaggtgaacgacaacagagctatcgacacctccggacaataatgcagctatattcatcatcataattattcgttaaacaacaaaagttgtgctaagatgccaatgtattaatcaccgacaaattagcacatcagcaaatctgtttcattaaatctttatcaaagtcaggttacggtccatccaaaaatcatttactctatatcactctctttggattctaattattctctctctatttatatgaatacctattgatcattttcgatgttgcaaagataaggcgggatttgctaacagcctatcacatattgaaggcatttttataccataaatgtggtagataagcaaagtatttcctacatttgcacactgaaaagctttttaagatgacgaatttacgcaaaatactacttatacctgccctgatcgtcgtatctgtcagcagcttcttttcgtgtggtgtggaccgctggccggaatatgcccacctgactgaactggatacatggatgtatgatatcatgcaacagaattatctgtggtatcaatatatgcctggctacgatgaagtaaacctgtttcaggaccctgccaccttcttatccaaagcaaaatgggacaaagacagctactcttttgtagattctgtcctggaagctccgttgccaacctatggattcgactactcgctcgtcaagagtcaggataacgatacggcatacaatgccttgattacttatgttatccccgaatcacccgccgaaaaagccggactccaacgcggtgactggattatgaaagtggacacttcctatatcagcaagaagtatgaaacgcaactactgcaaggtacaatagcaagagaactttcgatgggggtatggaaagaagtcgaggaagagcccgaagaaggggaagaagtaccggaagaaccggttatggtgtataaagtagtgccgaacggtgtcacgctggatttgggagccgcccagtctatagaagaccaaccggtacataaatacaaaattctgactttagacaatggtgctaaagtcggctatctgatgtacaacagcttcaccgccggaaccaataacgatccggagaagtataataatgaattacgtaaagtctcaacgatatttcaggaagccaacgtacaagccactatccttgaccttcgctataacgaaggaggatcgctggactgtgttcagttacttgccaccatccttgtgccaaatgcaagaatgggcactccgatggcttatctggaatataacgacaagaacttggacaaagacgcgaccatcaatttcgatcaggaggtgctgaagaccggtgtcaatctgaatcaaaacactttggtagcaatcaccagcggaacaacagccggagcagcagaaatgctactgaccagcctatacaaagaggatcaggctcctaacattattgtcatgggtagcgcaagcaagggacaaacagtggctacagagcaattcatcaatgaaacctaccgctggtctgtcaatccggtggtatgcaccgtttacaactccgaccatgatgcaggcgaagacgcattcgtgcttgttcccagcgataaattcaaaataagcgaaacgtctattaacgggaccaccgattacagccagttccttcctttcggcaatcctaaagaaagaatgctaagcatagccatccagacattggagggaacctatccgccgaaagacgaagacaaagaagaagaaactcgaggtaccaagagtattaagatagaaaaaagtgtcagcagtcctgccagcagaagatttgccggagggttacggattaaataaacaagtatgaaaaagatagcacttctgttgtgtgcgatagtaatgttcggttgttcggatgatgaagaaaaagcaggcacagaagttcctgacccggaaataagcaagatgctgttctccgaattttgcaagtccgatggaatcggagtatctgacgttactaaagaagaagagtttcgctacgaagatgcctggctgaccggttatacctacacgcaagaagtttcgatagcggacttgacagagatcatcagccatccgcttaccatccaatacgaaaacaatagaagcagtgttactttcacagacgaaatagggactgagcgtaaatacaccctaaacgaagaaggatacgccacgcaatgcgaatatgcttctctcgaccagaagagacaatataccttttcatatacggacggctatctgacacaagtgaatgaaaagattatgccccgggaaggaagcagcgatgcagttgtcgcgcacactctttctctacagtatgacaagggcgatttaatttccaccatctctccttcactgccctatgaatcatccaccggttacggaaagcttcagactaattatgaagcgggagaagatatcaattattatcgtcttccctgtatgctggtggcggatacttatcccctttccttccatcgtgaagccttgtttgccggcatgcttggcaaaccgacacaacaccttactaccgcctcttatccggagaaaaacagtgacacatacaccgaaagaaccgaatatacttatagctttgataaaaacaagaaacctgtcagtctaaaggtcagcactaaatatggtaatggcaaaagtatatcttatctgaatcgcacgatctcaattacgattgaataacccgattcttgtcaagagcagatttatagattcttaactccgactgaccttttccgctacataaaagcctgtttatcgaaacaaagcctccgttttcacctaacaaagcatctgattacacttaacatagtatgtaatttgccttaacataccttctaattcttcccgacatcccttctaaatttcaataagcaccgagctgaaccactcccagcaccgatctgaacagttcctcaccaagtagtacacaaaaaaaggagaaagttttcacttcctccttctatcgtagtctaatttcaatctactatatgattatgtctccaaagatacgacatccggatgcaaaagtcaagcttttccggttttatttcttgaagaatttatcaaagaacaaaatctgataatcgatagcgttattccagtattctccggtatgtcctccgggacgggtgataaaatcatgatcgatcttcttttccaataagcggttgtgcaaatccttattcacttgaatgaagaagtcagcctcgccacaatcaaagataatcgccaaatccccgttctgaatcttatcaatctgattgattacagtatgcgtgtcccatatttccttgttagattcataatcccccaggcgttttgccatgtcccaattcttcgggaacggacgaatgtctacacctccacttgtacttccacaagcgccaaaggtatctttatgacggatagcagtccacagaccaccatgtccgcccatactcaaaccggtaatggcacgccccttgcggtcggtgattgtcttgtaatgtccgtcgatatacttcaccagttccgatgagacaaaagtttcatatcggaaagacgggtctttcggactgtcccaataccagctggtacttccgtccgggcaaacaaatatgattcctttctcatccgcaatctgaggcagattgggtttaatctcaatccacgtcttggcatgtccgccaaaaccatgcaagagataaacagtaggacacgccgtagctttctttcccaatgccgcatccggagtgactactactaccttgatatccttgttcatggaaggacttttcactaataacgtatctactttggcagcaaaagaagacgctgccccaactaacaaaagagcgattaatagaagttttttctttttcattgtgtttataatatgtttagatccaatcattcttcatcttctcccgaaggttgaaattcggcgacaggtgtctcaaaagtctgatgacactgctggcaagtatattcccaatgattgtcccccggaggcgccgctgccagcatggaaagtacagctgcaccaacagcacgcagtttgtgtccttttctcaatacgaatttaatatcggacgaaccgcaataaggacagagcgtcagttcttcgggccagctttggttctgcctcagcacctgaacggctttctcataatcttcatccgctaccagaatatccactcccgcaatactgctcacgcaacttttatacaaagtagaaaagttctcattatgcagaatagattcaatgccctcattctccagcgccccttgaaggatatgcgccttcatcgcgtcattacaggtaatcaattttacggttttcatacttaaccagattttattattcccacaaaaatagaacataaaattgaaatgtgaaactattttccattaactttgcagtcgctaaactacaaataacatgaaaagactactgtcgcttctgctgttttgcaacataaccatatccttccttctggcacagcctgtccaccaagtgaagggaacagtcattgataaatccaaccgtcagccattggaatttatcaatgtaatgattgtcggactcaataaaggcggagtgacgaatgccgaaggtaagttctcgatcgggcaagtaccgcccggcatctaccgcctgcaagcgtccgctatcggatacaaaaccgtcactacccctgaatacatactttcgaccagagacctacatatacaaatagagatggaagagaatcagacggaactggaaggagtgaccgtcaccgcctcccctttccgccgggacattgaaagtccggtcagcctgcgcatcatcggactgcaggaaatagaaaagagtccgggagccaaccgggacatctcacgcatcgtacagtcttatccgggagttaccttctcaccgataggataccgtaacgacctgatcgtacgaggcggatcgccttccgaaaaccgcttttacctggacggagtagagattcctaatatcaaccatttcagtacacagggagcatcgggcggtccggtaggtatccttaatgccgacctgatacgggaagtgaacttctataccggagccttcccgacagacaaaggaaatgcgctcagttccgtgctcgacttcaaattgcgcgacggggacatggaacgcaattccctaaaagctactctcggagcttccgaagtctcccttgcctccaacggacatctgggcaagaagacttcctatctggtttccgtccgtcagtcctacctgcaatttctgtttgatatgctcggcctgccctttctgccgacttttacggatgcgcagttcaagctgaaaacaaggtttgacgcccggaatgaattgactgtactagggctgggcggcattgataagatgaaactaaacaccaaagccaacaatgaagacaacgaatacatcctcagttacctgcctaagattcagcaggagacgttcactctaggtgccgtataccggcactatgcaggggcacacgtgcagtcggtcgttgccagccacagttatctgaacaaccggaacaccaaatatcagcagaacgacgaaagcgatccggatcatctgatgctccgcctccgctctacagaacaaaatactcagctccgtcttgagaacagttcgtctttccgcaactggaaagtcactgtcggaaccagtctggactatagccagtatagcaacaccacctttcagaaggtatataccgaccatgcgcagacgttcgactaccatacctatctgggcattatgcgctggggacttttcggaacggtcaattacacctccatagacgagcgttttacggcttctctgggactgcgtgccgatgccaacaactactcggcagccatgaaagacctgtccgaccagctttctccccgcctgtcgctctcctatcaactgacggagcactggtcgctgagcggaaacgcaggactctattatcaactgcctccctacaccgctctcggctttaaaaacaataacggactctatgccaacaagtatgcgctccgctatatgcaagtcagccagggtagcgtaggactgaactggagaaagggcgataccttcgaagtatccgtcgaaggattctataaagattatgacaaaattcctctttccgtagccgacggcattccgttgacctgcaaaggaaacgattacggagtgattggcaatgagctgcttacttccaccgcacagggacggtcttacggagcagagcttctccttaaatggctggtcgccaagaaactgaatctcgcctcatctttcacgctctttaaaagcgaatatcgtactgataaggaaagcgagtacatcgcttccgcatgggacaaccgctttattttcaacttgcggggaacttacaatctcccccggcactggagcgtcggaatgaaagtcagctgtataggcggtgccccctatactccttataatgccgacaagtcatctctggtaacagcctggaatgcacagggaaaaccgtattacgactatacccgatacaatgaagaacgactcccggccttcactcaggtagatatccgcatagacaaaacattctatctgaagcgctgtatgctgggtttctacatcgatctgcagaatatcgcgggcagcaagctgaaacaggcagatgtattaatgagcaccggagtaatcaagaatccggacgcaccgatagccgaacaacggtatgtcatgaagtccctcaagcaagaaagcggtacactgctgccgactttgggaatcacgtttgaatactaacactatattatataataacaaactaaaaattcactatgatgaaaaaacaaattgcattagtagccctgttatttttgggcatgagttgttttaacgcttcagcacaattcaagaaattcaatttaggcaaagctattcaagcaggaaaagatgccgcacaagcaatctctctatctgacgccgacattgctgctatgagcaaggagtatatggaatggatggacaagcataacccactgaccaaaccggacagcgaatacggaaaacgcctggaaagactgaccggaaacatcaaagaagtagatggtatgaaagttaactttggcgtatatgaagtagtggacgttaacgctttcgcctgtggtgacggcagcgtgcgtatctgtgccggactgatggacgtcatgactgacgaagaagtaatggcagtaatcggtcatgagatcggtcatgtcatccataccgactctaaagacgcaatgaagaatgcatatttccgttcggctgtaaagaatgcggcaggagcagccagcagccaggtcgccaaactgactgactctgaactgggagcaatggcagaagcacttgccggcgcacaatactcacagaaacaagagtacgaagcagatgcctacggcgtagagttctgcgtaaaaaacaacatcgacccttatggtatgtacaaatcactgaataagcttctcgaattgtccaatggggctcccgcatcttcctacatgcagagaatgttttcttcacaccccgacactgccaaacgtgtagcccgtgctaaagaactggctgataaatacaaacaataaaaaagactcaagatcagaaattacaaaagaacatattccgagagcatttactttgcaacctcggaatatgttcttttgttcttaagccccctcatttcaaagaatacatcaccattccgcaccaattgtttattaaaaaatcattaatatacagcacatatttgcatgatgtcgtgatttcatgtaatttcacggcaataatcatttaaatccatttatggaatttcttatcatacttctcttacttgtactgaatggcatctttgccatgtacgaaattgcgctggtatcatccagcaaagcacgtctcgaaactctcgccggaaaaggcaacaaatctgcacgtggagtactgaaacaactggaagaacccgaaaagttcttgtccaccattcaaatcggtattaccctgatcggtatcgtatccggtgcctatggtggtgtcgctatcgcagacgaccttgttccgctcttctccctcataccgggagcggaagcctatgcacgtaatctggccatgatcaccactgtggtaatcatcacctatctctctcttatcatcggagagctggttcccaaatccattgccctcagtaatccggaacgatacgcaaccttgttcagtccgattatgattttattgacgaaagtatcctatccgttcgtctggctgctcagtatctccacccgcctgctgaacagaatcatcggcgtaaaaaacgaagaacgcccgatgacacaggaagagatcaaaatgattctccaccaaagctccgaacagggagtgatcgacaaggaagagacggaaatgctgcgtgatgtgttccgtttctcggacaaacgtgccaatgaactgatgacgcaccgtagagaccttgtcatcttccatcccgacgatacaaaagacaaggtgatgaagacaatcgaagaagaacactacagcaaatatctgttggtggacgagcggaaagacgagattattggtgtggtatccgtcaaagatattattctgatggtaggcaataaaaaggagttcaatctgcgcgaaatagcccgtccggctctgtttatccccgaaagtttatatgcaaataaaattttagagctgttcaagaagaacaaaaacaagttcggagttgttgttaacgagtatggtagtacagaaggtatcattaccctgcacgaccttaccgaaagcatcttcggagatatccttgaagaagacgatacggaagaggaagatatcgtcagaagacaggatggttcgatgctggtggaagcctcgatgaacatcaaggactttatggaagagatgggaatcttatcttatgaagacctggaggacgaagacttcacgaccctcggaggattggcaatgttcctgctgggcggtatcccgaaagccggagatatcttcacctacaagaacctgcaattcgaagtagtggatatggaccgtggacgggtagacaaactgctggtcatcaaacgggacgaagaataaagaaaaaataacccgagcagtaagctcactatatttatattaacttaaagcacttaacgatgaaaaaagtaattatgttagcagcagtcgtagctgctttggcatcttgccagtcaaaagccaacaaagccgcagaggcagaagcagacagtctttctatagaaatggctccgatcacagaagtgaccgaagtttatgaaggtacactccctgctgccgacggtccgggtatcgactacgtattgactctgaacgctgcaactgacggtgtagataccacgtatacactggatatgacttacctcgatgcagaaggtcagggtaagaataaaaccttctcttctaaaggaaaacaacagactatccaaaaagtagtgaacaaaaaacctaccaaagctgttaagttaactccgaatgatggtgaggctccaatgtattttgtgattgtaaatgacactaccctgcgtctggtaaacgatagcctgcaggaagctgtcagcgatctgaattatgacatcatcaaggtaaagaaataacaacctaaaccctaaccagtaaaatcatcctcgctacagctatctgtggcgaggatgatttcgttaaaagggaagtctgacacatccccctttttatttctatcccaatactccttctccctcctgcaggcgtttcagacgaagcaatgcctctatataataatagtctgcatagataatagaagcgtctatctccgaatgagccggccaatggcctgtgctatgaagcaggaaagccggattacttttaccgctctgataattgtcggaactcaggcttgtcagcatttcgatagcggcatccttgtagtgtttgcccttcccattggggagataggcagacagttcgagcagtgcggaagcaactacggcagccgccgaagcatcacgcggaacatcgggtatgcctggagcactgaaatcccaataaggtactttgtcttcgggcaagcgttccagatagacatcggctactttctgcacaaagtcaaggtatttgggatctttcgtttcacgatagactacggtatagccataaatagcccatgcttgtccacgtgcccacattgtgctgtccgcatatccttgatgagtcactcctttaatcaggttacctgtaatagtatcatatactgctacatgatatgaggtatagtccggacggaactgacacttcatagtcttgtcggcatgagatacagcgatgtcgtataagtaaggattccccccgttctttgctgcccagaaaagcatctcaagattgatcatattgtccatgatggtattgtggggccagttgcggggttctacttcccgcggccaggacagtatcgtgccgactaccggattaaacaaagtagccaatgaatcggctgtgtccagaatcacttgtttgtaagcgggattcttggtcaggcgatatccgttgccgtagctgcaaaaaaccagaaagcccagatcatgatcataagccggaatgcgggaaaggaactctaaggatgccgtaaacttttcggcttcttccagtatattcttgtcttgtgtatactcataatcataccacaacactcccggccagaaaccggcacaccattcttccttcgttgctttccgacagttccaatgatgttcgtctgccatgacattacgtggcatcattgtatagtctatacccgagtctcctttcagttctaccagtgaacgttgggtctgttccgcgcaataatccagagctttattcacatccaacgtaccggaagtccgatgggcacatgcacaaaagcctagtactacaaccaaccctgctacaatcttcttcattttttcgttctatatcttcgtgttagtttcttattttttattctcacttattctttcttatcatttagttacccggaaccagtctacatccgcccatccgcgatttccgtcattaggagtgacgcagaataaaccgactttcgctcctatccactttccctgccgggcagtaaaaggttctcccgctgctgtatacttctttccatcgagactataggcaaaggtgcaaacggctcccttggcaacctttacctgtaagtaaacggtcttccactcattatcagccactcccggcattttcagatattccaccggaaaactcgccagttccttcacttgttcggggtgctgttgttccgcatctttgcatacgacttgttgcaggataaacttgtcgccggctttacggacagacaaataactataatcccatcccattactatcattccggcttgctctccatcctgcttggcggtaaacgtcagcttggtagtagccgtaaactcttcagcgggaaacttttgcagcaacagattaggcacttcccaaaagttcacgaactctttggaaaggctgcctgcatagagccggatatatcccagatcggtcgtaaatccgtaggtatcctgtttgttggcatgccactgccactgtaatcccaagtgccgtgtatcgaactcgtcactttccggaggagtagttaccggatacatctttccgacattcggctttttataggtggtgacaggttctccacaaccgtctttgtctttatctactccgatcacaggccattcattcacccatttcatcggattgagatgaataacacgtccgtaagccccttgatcctgaaagtggacgaaccacgattctcctgtatttgtatctacccagcccccctgatgcggaccgttgatggtggtcttcccctgcgccatcacgatctttgattcatagggaccatagatattctttgaacgaagcaccagctgccaaccggtagctactccgcctgccggagcaaaaatataatagtaaccatttcgtttatagagcttcggtccttctaccgtatggttcttcccgtcatttccatcgaacaccattaccggatcggagatcacttccgttccttccgcattcagttcgcaaataaccagaatgctgttcactccgctgcggctgccggcataagcatgtatcagatatactttcccgtcctcgtcccaaagtggcgtcgggtcgatcattccttttccagctttcaccaatacgggtttgctccatgatcctttcggatctctggtctttatcatgtagattccataatccggatcgccccaataaatataaaactctcccttatgaaagcggatagcaggagcccatacacctttcccatgctgcgctttattgaaaaactctttgggttcctgtaccggcagcgcataattcaccagcgaccagtttaccagatcacgggaatgaagtataggaagtcccggtatgcaattaaaactggaagccgtcatatagaaatcatctcctgccgcacatacgtccggatcggaatagtcggcataaagcacagggttctgataagtaccattgcctttatcagccacccatgtccgggatatttcctgtgcactcgcccaagtacagcaagccatcattcctgctataaacagaatctttttacgcatattaccttactaataattcttttctaaattcaagtgttattcctgaaaacaagttctttctacctttattgaaagcgaatctaccttatatataagactagcccgtttaccaacctgttttcctatatatacgaaggggattcagtgtttacctaatcctccccctctttttctctataaatctatccaatctatcttttttgccctctcctgcctgtccgccacacttgcttttccgataaaagcgttttgtatcgctacttcattaaataaagaacaagggtacaacaagatagaccccattttgggagcagcggcagtagtatctatagctactatattttgatagaaaacagtttcatacgtctctactattaaaagaaacctgtcagtccgattataaagaagtcataatcgagctgacaggttatctgcgattcataataccttttttatttgcgatacatcatcagcgtgccccatcccaactggtcgaacgcaccgctgttcgttccgtaacgactactaccgtcaggaccacattccggacgcatcttgtctgccgcctgcttggcatacttgtaaccgctattcaggtttttcactttcgcataatggttgtagaggatttcccatcccggacgaagaccgccacgaccagcgtcgtctgctactgacgtatggatcgctccgtgacttttattagaacatgagcaatcaacgcaatacttatattcattgaacggcatcatgtcctttgttatcagccatgcacccgttgtattcgcttggtcggctccgtcacgcaggttgaaaagtgcggtatattcacccatcttcatgatagcgttgtcgttggcagcaaagaaatcgagttgcggcacagacggattgcccaaataaaaagtataagccatctgacaaagattggccgctacggcaacagtcatcatcgcatgtccctggtcacgtccgctctcctgattctgcgcaatcccttcaccgctacccaatggatcggtgaaagtgccccggatcagtttcccgatataaccgtttcctactccattatagaaatagttcactacatagttcaccatgtcatccttctccgtcagaatgccaatggccaagtaagaagacaagctgaccaaatcccagttagaccagtagtgatcaccacactgccctccgtgtttttctagaaaatcaagattctttttggcaaacacgtccagcatccattgtttaaagtccgacttatccttatccgtccagttattgtaagtctgcataatctccgccgcattagcaaacgtatagccctgcacgccagctgccaacgtctggttagcgtcattggaagtaatgcctttgcatttgtccgcccaatcgttcatcactttgatagaagcgttggcataatccacgtttccggtcagtttccacaataaagccatctgataggctgcggatgcatcacgcatggcgtttggatagttttccttatccactcccgtacctgttggatctcctctgacaatccattccgtaggagatgccacataagtagtcggagtgtaagtactattcttcagagtttcaaattcatccttcaccgcctgcggagccgtaccatcctcaagcattgtctttacacgggtaaaatcggcttcattaaacatggcgcacggatgctgataggtataacgcccttccacctcaatataaggcataggccagctgtctatatcggttgttccgtcttctatctcactggaacaggctgagaagcctgttaccaatagaagtcctaaagcaaatataaaattctttttcatgttgttttcattaatggttattattcaactctacttgcctgccgcaatctccgcttcggcaaaagcgatagcttcatccacagtcttgaaagtacgaatccagtagacatcataccaagctgcattgggatcgacattctcataaggaatgtcagccaccttgatttggaacagattaaagtcgtggaaaccttccgcatctacaaaagaactttctgcaaacttctttgtaagatccatataaatcagacgcgtgccgtcagaaagatcataagagtttgacgtgtctttactgtgcggattgcccgaatcacgtacatcccacgtattgtcacctcccttcggtattgtattcttcactacgaatataggataatcccggtgggcacggaacattgcgttattaccacactggatttttatatcctgacgccatttctttcccgaagcagtggcagggaagtatatacggcagtaaccatctcccatctgcggattaagaatagagagattccatgaatttttagtctgcggaccacagaagttattctccgaagtccagatccaccatccgtttataacagagatgacagtggaagcagtagcaccggtttctatacaagtagccgtaatctcagttataccgaatcctaccggagtaaccacacccaagtctaccgtagctacttcttcattgctggatgtccaggtgacagaacccagtgttgcgtcagcaggcgtataagttacatccagattgattgctcccatagaaatgcagaccggatccgtgtaaggcttgacttccacgttctctaccggaatatattccactaccgtcagttcatacgaaccaaccacttcgctatgatcgtgcgtataagccttgatagttgtcgttccggcttttccgcaagtcaccaatccatctttcgaaacggtagctacgttttcatcgctgcttccccacgtcaaataagaataagtgtgatttgccggtaatatttgagctttaaactgcaggcggtctgtttcaaaaatcacttctccctcgcgaggattgacaagcgttacgctttcggccttaataatttgaggaatcacagtgacagtcaccgaagccgtaaccccaaaaccgataggaggagtggcactgataaccgccgtaccttccgccacgccggtaattgtaccgtcttgagacacacgcgctacagcctcatccgtcgatctccaaagaatagtccggtcttccagttcttccggagcttccaccttacatacaatcattgaatccattccgatagccagcggcaatgtcggactgacatcaaacgtaatcgaattaatcaatttcgcttcgggcatggcaggcgtaaattccttatccttgtcgcatgcggtcaaagccaggcaagcagccatgatccccattgacactccttgcaggttcttatatatcgagtttctatttttcatacttgattatagttttatgaatgaaaagattattctccccaacccgggttctgtttcagattcgggttcaattgtaactggtcggtaggcaacgggtaaagataatgtttgctctcccatttacgtccagtttccaaaatgatgtaaccgtcactgttcttcgcgtaagaaacattcggccatttggttgcgtattccgtccctgtccacttgatacccaggaagtctttcggcatttccgtttcagcggttttccatcgtttcaagtcgtcgatacggaatccttcgttgaacaactccacggtacgttcgcgacggatttcctcacgcatattcaatccgttggcagtcaccagattattactcaacttcggcatactcttattaatacggttacgcaccagatttaaagagatattcaaatcatcgtccgaaatagcatcgtcacgttcgtacaccgcctccgcatagttcagcaatacttccgcatagcggatcaccggataatcgtagccttcactgttggtttgcaccttccgttccgccgcccatttctgattagcgtagccactaccattagcaggcgaataccctttgatagaagccgaagccttgtcggcagcatcactcgtccagttgacacgggagttttcattactccaataataaccgcccggcacacacaaggtataaagcatacggttgtcgcggttctgatattcatgagcaatgattccatccaccttaaacaaatataaggaagacttttctataggaagcccatcctgacaaagatacaaggcagcgaatttctgcgcaatctgttgtgcattggcaaggcattctttcgtgatgttcttaccgatgggattcaaggtctcatcatgacggcgagaaaatatatactctgtattagaagctttcaaaagtcctgccggattggattttacgtcttccagaataaacatgtatttctgcgcactatcacccaatatcgccggtgtgtacaatgaaaaattcttgctgttgataacctctttggccgcttttgccgccacgtccagcagttccttaccgcgcgcttcattaccacgaaacttttgccaggttccttcataaagagctactctcgacaagaatgcccaagcaccctcgcttcccactcttccattttctaccgcagaagtaagcggcaactgtccggcagcgtctttcaaatcctgaatcataaaatcaaccacctcgctacggtcattacgggctaccttcatctccggatcggtcacatccaacggcttcttcgtgataatgacatccccgtaaagctgcaacaattcgaagtaacagtaagcgcggaagaacttcgcttcgcctatgtattgttcgatgtcactctgatttccatagctttccgctttctgcaaaagaatattagtacggcgaatacgattgtaattgtccgtatagttattatcccctgtcggaatggagtttgttccgttgctgtacacattcgtgccggatttatccagaatcaagtccgaacgcttgtccgaatgaggcgcatcgtacacgctgttcgagaaatcgcgcgtccaaccataaaactgattggcaaacaatttgaaatcggatgcctcttgccagtagttaccatcggcaatctggtctttcgggtctaagtcaagacacgaataagtcaagcatcctagtgccattaccaaaatagcttttaatgtatatttcataattcgttccaattaaaaagttaagtttaatccaaaggtcacggtacgcaagaacggataacgctttgcattgtccacctcgctgctggcttccggatcccaaccgtcgctaatgttgctgtgttcccaaaggtcggagcccgacacatagaagcgaacttttgaaagaactttcgtcttggccagcaaggaggaaggtaaggtatatcccaatgtcacattcttcaaacgcagataagagccgtcttctaccgaccaagaagaacattgatagttgtagttattgagttctgacttattagtcaacgcgggatagtaagcgccggtattctccggggtccaagtatttccgataaactggttacttccgttttggtaagttgtgcgcatcggaattctccatgtactcttctcacgccatacagtgcgttttcccgctccctgaaaaacaatggagaaatcaagtcctttccactctactcctgcattgatagagaactgcatcttcggatcatccgtacccaagtacacaaggtcttccgcatccagttttccatccttgttgacgtcctcaaacatattgtcacctaagcgcaagttattcagcgtaccgatagaactgttattcttgtatttattcacatatttctgcaattgttcttcagtctgaatcttgccgcaataacgaagcccgaatatggagttcaacggatacccctcacggtcggaacgttttccggcctgaatcacaccgctaccgccattgtccaccagttcattggttgtgtaggtaaacgtaccgcctatatgatagttcacgtcaccaatcttatccgcccagttaatcataccttcccaaccgtgagccttgaactttcctttgtttgccgtaggagccttgtcacccaatatgcccggataaatcacgtcaatcagcatattgtcactcttcttccagaacatctcggcagtacccgtcagacgattacggaaaaaaccgaaatcaagtcctatattataattatgaatacgctcccaagtacggtcgaagcttggcaacttgccattcgtatcgacataagacactcttccattgcctagcaaagctccctgagtcgccttgaagttgtacaattgcgcaccgtcgtaacggtctattcccgactggttaccgacactaccgtaggaagctctcaacttcaattcatcgatgaaattcaatttcttgatgaaggcttcttccgaaagacgccatccaccggaaacaccccaatagaaagcccaacggttctcaggctggaacttggatgaaccatcgtaacggaactgaccttccaacatatacttggagcgatagttataattggcacgaccgaaataagacaacaccgcttcctgccatttggaagagtttgtttttttatcgtcactcgtcagataaatcaatccgtccttactgttaggaatctccagcgaaggaagaattcccatggcgcgaatataagtgtattcatactctttcatattatattgagaaccgaccatcacttttacatcatgtacgtctgcaaacagatgcgaccactccaaatgtccggaaacagaataaaaatccgtccgcgcattcgtcttcgtataagagctttccgcatcggtaggagaagtacggactaactgatcaccggcataattataccattcaatcgatttctgttgggtatcgcgagtggcggtagatgtattgtaacccgcagtggcggagaatttcaagcccttcaatatcgaatagttaaacgtttcgctgatattgatagccgacaccttgagtttattatcaccgcccaattcacaataccagttaggaccgccccacgtaccccaggcatacggttttccgtccgctgttgccgaagggaatcccggttgctgcacaccggtggtcagagcggaaccgatttgagtcggagctacctgatcctgacggttataagcaatcaccgattcgatagatgccctctccgacagcttaaagctattggtcagacgcagattataacggttattattattgttaccccacttcaagttactgtcatcaaacatataacctaaagacagacgatacttggaagcctccgtaccaccggagatagccagctcatgttgggtggaagcagctgtcccccacatgatatcctgccagtcggtatcaaagaatacaaaatcagcaacatcggtaaatgccccgctaaaaggattggtggtattattcaagttgatatactggtttttatacgctaaagccaatttagcatatcgcatccaagtatcatcatcgttaaaaccatcattggtacgggtctctatcaacgaggtggcccattggtcgaggctcatcaattcaggagacaaaccgataaacttcgctgtcaccgagccgttatattctactctcgtcttgccttcttttgctttcttggttgtcaccaatacgacaccaccggcagccttgctaccataaatggaagcggcagcatccttcaagaagttaatgctctcaatgtccgaaggattcagcagccgaagttcattcacgctctcatactccacaccgtcgataatcaccaacgggctcgtcgtgtttttagaaactgcaccgcgcaggctcatcccccagctctcatcgcccggagccgaagaactgcgggtaatgatgacacccggcacctgtccctgcaatgcctgcacaggactagatatcgtacctttactttccagcatcttgtcactgaccaccgtcacagaacctgtcatagtcgcctttttctgcgtaccgtagcccacaacgaccacttcatccagcacctccgagtcttccgtcagcaccactttcagcgaagcattaccgctcaccaccacttcctgcgtcttatatccgatgtaagaaatcaccagagtgcccgccttcacgccctgtagcgtgaagttgccgtctatgtccgttatcgtaccgttcgtagtccctttcagcaacacactggcaccaattatcggctcgccattggcatccaccaccaagcctttcaccgtggcagcctgcatcgctgtctgcacttcacccgtttccgcacgtccactctgtggaactcccgtcaacaaggcagaagcaatcatcgtagagaacaagattcttttcgatgtaccttttaagatattattcatacaattaaatttgaggtttaaaaatagtattaatttttcgtttttgaaaattaaatggggcataagcatgtctctccatagattctgattccttttccataagcacaaagggtatttattaatgaataagattatatacaatttcggaagaattcgcgcatatcacgacgaccgatgagcaggtggttctccaccgtccggcagctcaagttcagttcgccggctatttcgggcgaagctttgccttcaaagcggttcagcgtgtatatcaaccgacgttgtttgggcatagtagccagacgcatccgctccatcgccatcaaatcgtcaccgataattttttcttctgtttcattggtcgaagcagacatcgtatcatagagatagccgtctatctcctgcttcttataataacgacggatatagtcggtcactaaattgcgtgcgatcgtaaaaaggaagtattttactgtatccggacggagcatctgtttgtaatccatcagacgcacaaatacatcttgagttaaatcctccgcttcataacggtgagcaatccgataggtaatatagtttaagattacctgatgatattcctcgtaagaacgggtgataatgttgtcggaagtgtaagctgttgtctccataatactatctttttcggttttgaacacgatgcaaatataaaggcaattccggagaatgatttcaaaaaacaagggagatgaatctcaacgcatctaggtagactttattttatttaagcaaatgaattacaatcacttacatactttttaaacggagtctcactttataaaatgagactccgtttgggcataataagcagaccgatggttcacatctcatcaatttgagcaaagtaacctgggaaataaaaagcctttggttattgtcacttatcaccttgacaggacaagtgtcttataattaaagcagtaagggtgataatagatggtgataataaggtgataatagaatagttattgatttctattatcacctgtttttgataagcgatctatttattcaattgattatcaggtgttagacagactattcaagggtaacgtctaccaatgttaaaaacaccatttttgccatgaatgtacgttgtttacgcccaatattgttctatgtaagctgcatgtattaagacaaaggctgagaagcttaacatacaaacaaggcttgactaatatattcaggtgctttcatgtattcatttcacgtacgtgaaccgttcagctcatgtacgtaagcccaatgaatcacgtacatgaaccgatggaatcacatacgtgaaacgatctcttgttactgaccgaatacattaatcttacctgcataatatcttaatgaagggagcacatttactattcatctttagccgttcctccgatactgcgaatatactcgttcggagtaactccggtacttttcttgaatgaacggaagaaagaagcacgtgaactgaagccgcatagttctgccaatgctgtcaatgtataacgggagtaatcattatcctctaccattttcttgaactgggcaacccgatactcatttataaagtcatagtatgactgattaagatattgattgagcagataggacaaggaatgggaagaagtatgcaatgcggcggcaagttctcccattttcaagtcgggattaatataaggtttttctttctccacataagcaacaagcctgtcatgaagttctttacattcggcttcgctcatacggttggccttatatttttcttctgcaggatgtggttccaccgtcttttcttcttcctcttcttcttcggatgagatctcgtgtacttccgtgaccaatggagcagatttccgcacataatatctcaccagaacaacgatcagaataatcgatatagcgagaatcacccatccccaccaaggaatcatcggctgcacagtcaccttataaatggccattgattgttcattgcccggaatacgtacacagaatgtgtatgtcccggaagaaagcccataatacgatacttcactctgtgctgtcagcaacttccagtcactgtccactccctccagtttatactcatataacaaggcagaaggtaatccatacgcaaaatcggtaaaacagaaagtaagattgttctgattatacttcaaagacgatttattgatagaaactccattagccagaatatccgtaaagacaatcggacggacctttccacgtacctcatctacctgtttcggatctacatagatcagccccttggtattgccaaaccacaacagtcctctttcatctttataagccgctccgttagtgaaagtcggtcccggcactccgtcattgaaggtgaaggagtcatactcttctccttcttccttaatacgcaacaatccatcgttgcagcctacccacagccagccttgattatcttctgttattgacatcagcgagttatcgggaagcgtagaaagtactgattgattgcggaaatggtccatcgttaaggtagaagtaaacaggctgcctttctcacggataaagtaaaggttatgttctgcatcttcataaatagtacgtactttatctttgtgtacaaatccttccggaaacacattggaacgaaggctttgtgaggccggatcatagatgcacataccggtttctgtagcaatccacccttttccggtagagtcaaaacttacttcgtacacatttccttcgggcaactgagagttggtgctggtgaagtttttgatttgctttgtctgcccgttgtaacagaatagtccctgcgaggtgccaatccaaagatttcccctgttatccggttttacacagaagatatgtcctttctggaagagttccgtatcaccttgtgtaaagtatttgagagataacgtctgcggatttaataccatcataccaccgccatacgtaccgatataatattcaccttcatagaagcaaatggtaaggatcagatcggacgtaagaaccggtttcacgaaacttttcactatgccggtagcttcgttaatatagaacaatccgtcacgcgaaccaatcactttctccggtccccggtttacgaacgaacgaattgataaattggcagagttaaactgaggaggataagcgtacgtacggaacagtccgttttgatacagtgaataatccaatccggcttggaaatgtcctacccagactgcacccctgtcatccaccagtagtgagtagatagaattactgcgaatcccttctttatcattcacatcatggaaaaagcggcgaaccactttccggtctttgtgagaaaggaaatgaaccccatttccatctgtagcgatgtacaccgtctcctttccatcaccggaaatatcagatatcacatcacatcccaaagaaaccgtatgggcaaatgtctgtttcgggatatcgaaacagacgactccctgactcattgtacccagatacagcgtttcacctatgcgggtcagacaacggaaataatcggcttcgggaacattctctctgaaatgccaggaattgatctgaccatctttcagcgaataagaaaataacccttgcactgttgccaaccaaaggacactcttatcttcattcaggcagaggtccatgatccggttacaggctgccagcatatttttatcggtctgtacctgaagcaactgaccgtctttctgaataaacagtcctctctccgtacctatataaagtacatctccatctgccaacaaagcattgacggcacagtcgatcttctcaggaacgattctctgcaattcactaccggagcgattcagccgccagagtccgattccatttccgatccatagttgcttgttatcggtttctgtaatacagttcacccgtttctttcttcccgaatctactccgcggaattcgaaatgcttcaccttcacaccgtcaaaacggtcgaggccgttgtctgtccccaaccagatgaaaccttccgagtctttataaatagcattcaccaacaaaccggaaaggccgtcggacataacgacattacgaaacatatagggttgtgcctgcaagttttccccgcaaacccaacacattattataagaaccaaatatttaatcgtgcttttcacctgccaacgggctttatcatattaaacatgtgacaaacatacacaaaaatctccaaaagagagcggttccttatctaaaaagtcgcctctccgtatttgctgatgctaatagacaaatacgaagaggcggaagtatttactcaatgcacccgaataatttattcgtgcctgttcattaaattaaatcaatcttgtaaatcccaatacactacataacgctggtgatgcaaatcataaagcggacggatcacatctccttgctccgtagtaaatttcaagtcttttcccacacggtgcaatgttcgtttggggtgtttcacgtctattttcaatgatgtacgcagatcggcaggaacatgaaaattataagtataataatcgttgtaaagagcaggatcagagaagggagcaggtgcctgcattccttccgttccccgttctccggcaagtactaacggtccatacagcaaagctactttattcggattatcgggagtagcttccagttcgatctgcatgggataagtggccgcaatacggtcaccatctttccattcacgggtaatagcgatataagaacccggtttctgtttcactgacacctttttaccattcacaagtaccttcacatttttactccatgagggatatctcaaataaatagtagtatgccttggcttttctgcacgaagagtgagccgagtagtctcttccttcggaaaatcggtttcctgaagaagcgtcagtcctttttctttccaagtcacctgggaaggaataaacagattcacatagatgcctttatcgttatggtaatagatggcttctccatatttggcatgattctcgaatccactgcctacacaacaccagaaagaattttctttggtgctatacagtttatgagagccggaaagtaacggaaggaaataagtgaccatccctgtttccgggtcttgctgtccaaggatatgattgtataatgctctctcgtagtaatcggcaatagaagaatcaccggtccagcagaaaagatggcgactaagtttcagcatattgtaggtgcaacatgtttcaccggtataaccagtcaagtgtttagagcatttcttcgggtcgaaaaaatgctctttatcactgctgcatcccggagcaaaggtgtgatggtcaatcatggtatgccagaaaaactctgaaagttttttgctcgtctcattctgcgtcaattcatagttgcgagcttctgcaattactttcgggataaatgtatttgtatgtttggttcccaaatcatcccgaagttctttcagtgggtcgatcacgtcattatgatagaaatattccgccaaccaacgataacgctcgtcgcctgtgatggcatataaattataaaatgattcgttgattcccccgaactcattacgtatcattaaccggcgtgtctcttcactaagcggtttcagtttgttataagcccagtcgcccattttggtcaccacactcaaagcctgctgattatctgcatataagtattggtctatcagaccggaataaagtttatgcaaggtataccaaggtgcccagacactctttccctgaatattgcggttgatcagttcttcgggatatgcgctcagatatcctcctttaagtgcattctgcacttcggtcaatccgtttacaaggctatctcctttgagtttgaaaatctcacttccggtagcagcgtacatcaatgcgtaagctgaaagcaaatgtccggtagtatgtccgcgaagttcgcagtccagagattcccagccaccgagtttttttacagtcatatagccgccttcacgacctgcaaagacaccggcattggtccggaagctatgtaacagacgattcacatcaagagaagtcatccatgccgaatcccgcaacatattatcacgaaaacgactcgctaagaggcggacatcctttaaatcaaaactctgtacccgaattggagccactgtctcttttttcatttttccctgatgctgaccggggtatacagactgggcggacatcatagtcgacactgccaaccatgctattacaactagatttttcttattcataatcattctttgtatccttttcaataagatacgaataagcgctgttcaacactcaatacaatgaaattaattctgattgatcgttccgtaagctttcgttttattccatattattgataaataaagaaacttcgttctatcggctctgctgtctgtacctttcccgccagcccatattgccaggcaactactgtcaccttcaacggatatttactgcgaggaggtatcggagtaaatacaagtttgtttccgtcgatttccgcagggccttctttcacataataatatacaggcagtccgcaatcggaagtagcccgaagagtgacggactccacccctgccttcacatccccaatgcctgggaaaagtatatactgtcgtttcccctccgtgttacggtaaggaatccggaaactaagttcctgcactgtacttttatattgattatcaccgtcatgactcgccaagaggcagatgtctcctgtgcgacgcttattatacattcccatgcggtagaaacgaacagtaaaagtagtatcattcaccttctgtaccggtccgcagatgcgggttatttcgggaaaggtcgatgaatgttcgtcggagatggttgtatgcagactatccgtaaatacagctttcagatgaaaagtaagtccatcttcctccggcaggaaacgggcggcaactttcacatgagacttcgggtgatatgcaagaaggctgttctcttgtacaaaaccaagatattgcggttttttccctctttcctgacgataacgttcttctgtcatgtcaaccatctctttatcgaaataccagaaggcatcatgcggatcgcctttgtattgtttgaagggagctgctttagcacgtctcttttggtcaggatgccaacgctcggcaagccatccgttttccggattcaatttcttcagcatcacgggcttatctacatcatacgtttccggcaatcggtactccatggctttcttcagaaacaatgcaaggtatactgccgtacggtctgcaatatcaaaatgtccgcgcccagtatcacaaagaaacgagatgcaactccggggatacatcaggcgaaacgccaatgccggatttacgcgatcttcccaccattcatattctccttcgatcatcaagccgggaatgccgtcaatagtacgtttcccccactccatgttatcacggccatatccggtaagattagtacgcggtgcgtctccatgaaaggaaatgacagccaatgtccgttcgggattccatgctgcaaaattccaaggataagttgccatcgccgaatgtccgaaaggaacaatcggaacgtattttaattcattgtaaccgctgatagcggcaaagtcctccaacatctgttcaaatgccctctgacttccggcagatacatcccatttctggtcccagcccggagtaatccagatcaagcccatacctatttcggacattttctcccgaaacagaagattctcaaacagggtttcctctgtcatattgtgagtacctatcatcacacctcttacctgggcacaatcagaaggtatccataggaatgcctgtggatgatcatcagtttcgttagaaataatgccgggtatttgtacagaccactgccattccgccgctatacattccggccataacataaacactaatattccaaatactaaaaatcgaagtagtttcatgttccattcatttatcgttattttatgtaatacgtaacgaaaccaaagtatactcaaccgaaaaatataaaaaaactattattataggaactctttcatcgacaatttcacaaaaacgtcgtatctttattctcaattaagaaaggagtgatatggatttacgtacagcaaacgtaactagatatattcttcccctgcgggaaggcggatcattgccggctttggctgaagctgacgatgagttcaaatatgtcgtaaaattcagaggagcagggcacggaaccaaagcccttatcgctgaattgatcggaggagaaatagcccgtactctgggcttcagagtaccggagatcatcttcctgaatttagatgaagctttcggccgaacggaagcagatgaagagatacaggatttactgcaatggagccgtggattgaatatcggtttgcatttcttgtccggagcgttgaccttcgatcctgtcgtacatcaagtggatggtaaaaccgcctcacagattgtgtggatggatgcttttctgacaaatgtggaccgtaccatcaagaataccaatatgctgatgtggcataaagaattatggctgatcgatcatggagcttccctttacttccaacatagctggaccaactggcagcaacaggcactcaccccattcgtgcagataaaagatcatgttttattgccatttgccgaccaactgaaagaaacagatatggcattcagacagttactaacctccgataagatacgggaaatagtcaataccgtccccgacgactggttgaactggacggaaggacaggaaactccacaagacctgagagatatttatattcaatttttagaggaaaggatcaagcattccgaactatttgtaaatgaagcgcaacatgcaagaaaggcacttatatgaatacgcaaccattcgtttcgttcccaaagtagaacgtgaagaatttatcaatgtaggtattgtactgttctccaaacgatgcaaatacctcaaatcactttatacgatagatgagaataaactgaaactgttttcttccgaactggatatgaattgtctgaaagaaggactgcatgtcttcgacaggatttgttcgggtagtaaagaagggggaatgatagcaagcatggatgtccccgatcgtttccggtggctgaccgctgtaaaaagctcatgtatacaagtatcccgcccgcatcccggattttccgaggatttggatgctaccttggagcgtttgttcaaagaattagtgctttaaatgatcaatcatggaatttatcaagataacagagcaaccatcgctctatgatgacctcgacaagaagtcggtaaaagagattctggaagatatcaatactgaagaccataaagtagcagatgccgtgcagaaagcaatcccacaaatagagaaactggtcacattaattattccccgagtaaaaaaaggtgggagaatattctatatgggagccggaacaagcggacgtttaggtgtactcgacgcttccgaaatacctccgactttcggtatgcctcccaccgtagttatcggactaatcgccggaggagataccgccttgcgcaatcccgtcgagaatgcggaagatgatatgtcccgcggatgggaagagttattgcagcatcatatcaatagtgaagatacagtcatcggaattgcagcatccggcaccactccttatgtgatcggagccatgcatacagcacgggaacacggaatactgaccggctgcattaccagtaatccaaattcgccgatggctaccgaagctgatgtaccgatagaagttattgtcggtccggagtatgtgacaggaagttctcggatgaaatcgggtactgctcaaaagatgattctgaatatgatcagtactactatcatgattgaactgggacgcgtgcaaggaaataaaatggtcaatatgcaattgagtaaccaaaaactcattgatcggggaacgcgcatgatcattgaagaactccatctggactacgaaaaggctgaggcacttctgttgctacacggttcggttaagtctgcgatagaggcctatcgcagacacaactctactcagcaagagtaaaatgcagtgcagcaccaccggaggactttaacttcaaagttagcttatctccggcttttattttcttatgagtagtacgaacctttgtacgtgtattcaacttgtcgtcatcttcatacaagttgactatatacttcgttcccggtttcaaaaaatccgtggttaacgtaatggtacgcgcttctgtatttgtcattgctcccacaaaccattcttttccggaacgacgagcctgcacaatatattcacctatttctccatctaatgcacgactttcatcccaaacagtcgggatggctttccagaactccagttcctcctcacctttatacatagcaggattatcataccaaaacataaattgcaaaggactgtaatatacggctgccattgccaattgatgtgctttggtgtttttcacgcgactattaaaataacagagtgtataatctcctgcgcctgccagaaaacgagtataagggagaatggtattgtgtgtcgcatccggcatctcttcatttccacggataccttcttgcgtcatcaaattgggataggtacgactgaaaccggttggacgatattcatcatgaatatccaccatcatttcatattccgcacatttacggactgcatcatgtagccacgtactccaatgctgattacctatctgtacaaaaccgaatttaattcctttcaatccccattttttatacaatggcaataaagaatctagctgttgaaccaaagcacgttgattgacatagaccattaatccaatgcctttagattctgcatatttacataaagcagaaatatcaagatctttatccggagaaaccgtagtagcatccgaactcattttcatttccgggccataccatcctgcatccatatgtacatattgaatgccacgttccactgcaaaatcaatggctgcttttactttctcctgttttaagtctccagaacggaatactttcccaggcttaatccaagaaatatctgatatccgacaaggagtatttaaattcaaagccaaatcattatgattgatcaaatcgaccggacgttcggcagccataatgacacgccaaggggtactgtagggagaaataatgtcaacgctgctatacaagctagtttccagtgttgaaggcttctctacagacaaacggaattttccacgagcataatccaccatctccgcttccagtaatgcaacagtcaatccatctagcagtttcatagtcaaagggcgttcactttcctcttttccccaccctgacaggggacgaagctcataaggaccttgtgcccaacgttcatagtaagccattgtaccttcaggcattgtgaaacttgtccgttcacctgtaatatgtaaaaatagtccattggtcgtttccggaaaatggtaacggaatgccactccttcgttataggcgcggacaataatattcataaagtagtttttacgtttgtcgtaaccgccttcagtcgtcccttgtccttctcctttacgaaactttaaagtcatttcattataacagtcccgaacttcggcacgctctccatatacaggcttccatgtttcatcgtttttccgatgatcagtatccgttaatttcagattctcgcaccaaaaatagcaagtatcatttggtactcccaatgccgattcaaacaattgattctctatctgtacaccgagttcaccctcctccactacaggacgattcttatatgtcagcgtataatacattcgtgcattatcctctccgaacgaacgctggtaaaaggtgaaccgatacgctccgtctggggaagtcagttcccggcgggtttctgtcatcacattctgtgcctttgtcagtgtcggtattaccaacagtaaaagcaagatacttttcttcattctatttaaattcatgtttatccgtttttccaatatatacgaacgaattaattattatactcaatctgtctcccaaagaaacactacttctcaattctttttataaaagtctcttttctttcatacatttctgcaaatataaacaaacatcttgcaaaaataagcacaacatcacattcaaaaagcagctacttttgcatcaattcatataaataataaataaaaccatgaacgaattatttagtattgccggtaaggtagctgtaattaccggagcaggtggtgtgttgggaggaaatatcgcccagcactttgtacagcagggagcaaaagttgtagctatcgacatccgtcaggaacaactggacaaccgtgtagcagaacttaaacaatatggtcaggatgttatcggtattattggagacgtgctggacatcgccagtctggaaaaagtagcggaagagattgttgcccaatggggacagattgatattctgttgaatattgccggaggcaacatgccgggagccactcttgaatcggatcagaacttctatgatatggacatttcctgttgggagaaagtgaccagtctgaatatgaacggtacagtctatccgtctatgatctttggtaaagtgatggcagagcagaaaaaaggttgcattatcaatgtgtcttctatggctgcttatagtgccatcacccgtgtgccggggtattcggctgcaaaaacagctgtagctaactttacacaatggcttgccagtgagatggctctgaaatatggtgacggcatccgtgtaaatgccattgctcccggtttctttatcggcgatcagaaccgtcgcgtacttatcaatccggatggctcgctgactgacagaagcaaaaaggttttagccaagacaccgatgaaccgttttggtgatattaaagaattgaacggtgccgtacaatttttgtgtagcgaagctgccagttttgtaaccggtgcaatgttgcctatcgacggtggattcagtgcattcagcggcgtataaagagaagaaactatgatggaaaaaacatggagatggtttggcaagaaagacaagattaccttgccaatgctccggcaaataggtgtggaagggattgttacagctttgcacgacataccgaacgaagaaatatggacaatagaagcgattaatgctctgaaatcctatatagaatcatacggactgcgctggtctgtagtagaaagtttgcccgtatgcgaagcgatcaaatatggtgggacagaacgtgaacagttgatagagaactacaaagtaagccttaccaatctaggtaaatgtggaataaaaactgtttgctataactttatgccagtcatcgactggatacgtacagacttgcagtacctctgccccgacggtactagctcattgtattatgaccgtatccgtttcgcctatttcgacatgaagatactggaacgggaaggggctgaaaaggattatacggaagaagaacttcataaagtttccgaactggatcaagtgatcaccgaaaaagagaaggatgatctgattgataccattatcgttaagacacaaggatttgtcaatgggaacatcaaagaaggagacaaagaaccggtcgtccttttcaaacggttgttaactttgtacaaagatattaaccgtgacatcctgcgagaaaatatgtgtcactttctttctgccattatgccggtttgcgaagaatacggagtgaatatgtgcgtgcatcccgacgatcctccattccaggttcttggtcttcctcgtatcgtcaccaatgaagaagatatagcctggtttctgaatgcagtagacaatccgcacaacggactgacattctgtgcaggttccttgagtgccggcgaacacaatgatacccgcgaattggcaaagatgtttgctaagcgtacgcactttatacacctacgcagcacagccgccatgccgggtggaaacttcattgaaagttctcacctggcaggaagaggacatatcattgaccttatccgaatctttgagaaagaaaatccgggattacctatgcgcattgatcacgggagaatgatgctgggagatgaagacaaggggtataatccaggctattctttttatggacgtatgctggcactggcgcaagtagagggtatgatgacggtagtggatgatgaaataaaacgtcagatgaaattatgattctctttcaccagacattgatgcaaaaaagaagggagaagtcatatttaacatctcccttctttttatctatcatagcaataatcaatttctctttgaaacgatttatttcttttgtccttcttggaaatccggtatacgttttacatccgcacctttcattacaccttttttaattgcttcattggtttctgaaatttctttcttaacacgcttataatattctttagtcagtcctttctccacagcttcagactctgtagccgcccagaaatactggtaatccatcagcatcaagtcaggagcaaccaccttaaagaaaatactatctccttcaaatttttcacgtaaatcacctaaataaatagtgtctgccggatttacttcttgtgtacttgcatttttttgtgaactactgctaccacaagaggctaacaataagcctccaaataacgaaataaaaattaataatttcatatatctatcatttataatataaaacatgctcaacggttcaattatcaggatcagaatatcatcctgtaacagagtgcacaaaaatagtaatttataatatcataatgatcatttttctgttctttttctatattttcctacaaattacttgagtaatacgttaattactccctaaaaatgcttcacacatacttatatcatatcaccactttatctatccctttctactttttccaatcggaaagcactgagacataacttttgtccggccttgtcaacacgtaaacgcaatacacaggcaccagccgaaagtgaaagttcgccaagttttgtttctttccactttttagaagaagggatcgaagacgagatttctaatccctgatcagaggccattgctacatgtgaagaggaatttgccgaataagtaagataaacagcgtaagctccacttttagggatattaacagtataattcatccactcgccgtcttctacctgaaccactacgtatttattatctattttctgtaattcaactgctccatccggacgatactcatttccacgtactgtccctatattatgataggtatgcccttcaggattttctgatatacaataataatcataatcagcagccaaaattgtactgggcaattgatgcaaaccggaaactcgcttacctgtagaaaaagtaaccggatcacctgccatccaaggggtcagtcgcttagttaaagtcccccaaccagtccactcataaaaccaattcggggctactccccaattctcacatccataacgttctatcatataatcacgataacgctgtaaccaggtatatttttcagccggtaatccactacgcaccgcataatgtgccaatgccatttctctggttcctcctgtcccggcaacatctccccgtccatgagaggagatattcacagactcccaacgtccgctacgactttttatctggagatatttcccgttatcaaatgtgacttcattcatatcctttgttaatcctgttggctcccaaggtgtttcctgttttttgtaagattgaatacttgacaggttataacgataactccattctagcccgagcaataaacgattgtccaaactactatataaagaatccccctgattccatgccatttctgcaatagcaacataattgtgcaacccggctaatacatgtccctgatcacgactggattcctgacactgaccattaggataaatataatattggagctgttcgtcataaccataatcctgaatatcattcttccgttgtaacaatttataatcaatcatagtaggagaaacatgaatgggttgatcgctggaaatagccggtcctgaaggatatggcaaatcatctttacgatgtttcattcccagtaaatggcgataagcacggtcatacattatctcattatcaagatagatagccattgccatcatactgcgtgctgcaaacaatccttgattaccgaaacgcgctgcatcaaaattatagatattccaataaaaagttactccattttttgtatcatccagataattagcatatttagcagaataattttccgtattactataccccggataaaccagcatatctttgaaacgttgctgatcttgccgtgtccatccagaataatctctcatcatttcagccgcatcaatcaacaaataaattttcccattatccaacggtcctgtaccacggctactagtattagtataataagaatttgcattcaaatattctacagccttacgtgcataggcttcttctcctgtcaagtgccaaagaagagctaaatcatgagcacgacgcccatccaccccgattgtagcattaaatcgcccttcctttatttgctctccacgattcaccacaggtgcatcaagtgatgaataagaagactccttcaatttcaaaaaggtagaataataaggttcttgtctggcttctaccattgctttcatacgatcgaggtcaccttgcgtataagtaatacccggatgaacaaaacgacgttgtgactgaactacatcacttgtaaaaacaatattttccacatgaggtcctacatatatgcgtgccatatctgaagtcttataccaccgaggtttgtccggcatattatcatcaatcaattttccatttattttcaaattttcaaaacgtatgttctttaccttacgtttttcatcatatccttcaataatagaaagttccgcattctctccggtataggatatattcttaaacaatacgttctcaattcctcttccgggagcagtacagtatttttcattataaaagatacgtaaattgacaagttgcccctgacggaaattctcaacacggatgtcctcaaaatgaacattgcgtattaaattgttatcacctgcattaatagccatacatccttgataatcgacttgtttctctctatgatccaatatatcaatattaatataattcagatcttccaaaacttcgggagcttttgaattaccatgaattccaataaaaataggatgggctacatctgcccaaagagtggaattctgcattgttatattccgacaacctccttcaaatcccaaacgagtgccataaacagttgtacaatcatctgagttacggcagaagacaccatcaaataatacgttattgctcgcaaaaacattcatgccatctccccacccataataactaatacttttgacattacggatagtaacattttccgaccctcctgtcgcacattgagtagcaacaattccttctacatagacatctcgggaattcgcaatacgaatacctccttttatagaatgatcgataattcctcttcctagcaattttacatcatgtacgttttcgattaggacacgccccattaaaacagctcctcctgccagatacacagtcttaccggatggcactctcaattccccatttttaactgtatgtattccaggaccaaagtaaattacttccggattatctttgtccggaatcgttctttccggagatcctgtaaataagtgaagattatgaaaaatatccccatttacttctactgacaaatttcgaggatgctctaatgtaaaagttactgtattaccatcgatctgaaatgggatatcatacgagagaggacggacttttgccgtctgtacttctcccaaattataggttacggctacttccacttttcctgtaaaatcaaaaattgccatcgaagcattttctacataatgtcgtgtatctcttacctcatccaccttaatcagataagaagataaggtatgccagactccatcttgcaaacggaccttaaccgtaaaatcactatttaaagcaactcctgcgggagccttccaggttgcaagcgtgtctttagcaaagatacaagttgcaccacctaataatgcagctaataataagaaccaatatttcttcatccttaattccgcaacactttgatttaactttatttataagttcctgagcaacaaaaagttgctcaggattttgccatgtcagatttttcacttatcttagtgttgcaaatcaaaacaagcgtaaatcgtaacaagacatggcaaaggtacaaataaaatctgaaaaactcacaccttttggaggaattttttcaatcatggagcaatttgactccatgctttcacctattatcgaccagacacttggtcagagatgccgcagtatcatcggataccagtacagcgaaattattcgttctctgatgagcgtatacttctgtggcggttcatgcgtggaggatgtaacatcgcatctgatgcgtcatctctcgtatcatccgaccttgcgcacatgcagctctgataccatcctcagagccatcaaggaactgacacaggaaaacatctcatatacttccgataagggcaagacctatgatttcaatacggcagacaagctcaacgccttgcttataaaagccttggtttccactggtgaactgaatgaggtggaaacctacgatgttgatttcgaccatcagttccttgaaacagagaagtatgatgcaaaaccgacatacaagaagttcctcggctacagacctggcgtatatgtcatcggtgacatgattgtctatgtcgagaacagcgatggcaacacaaatgtgcgcttttatcaggctgagacccacaagagattctttgccctactggaagccaacagcatccgtgtgaatcgcttcagagccgactgtggttcgtgctcgaaggaaattgtcagtgagatagagaagcattgcacgcacttctacatccgcgccaacagatgcagttcgctctacgatgacttgttttcactgaggggatggaagacggaggaaatcaacggcatccagtttgaactcaattccattcttgttgagaaatgggaaggcaagtgctatcgtcttgtcattcagagacaaaagcgcatggatggagagcttgacttgtgggaaggtgaatacacctacagatgcattcttaccaacgattatgactcatcaacaagagacatcgtcgaattttacaacaagcgtgggggcaaagagcgtatattcgatgatatgaacaacggattcggctggaacaggctccccaagtcgttcatgtcagagaacaccgtattccttctgcttacggcattgatacacaatttctataagaccatcattagcaagcttgacaccaaggctttcgggctcaaggaaacgagtcgcataaaggcttttgtcttcagcttcatctccgtacctgccaagtggatcatgacagcaaggcaatacgtgctgaatatctatactgaaaaccgggcttatgcaagacctttcaaaacagaattcggataagaatcctttctttccggttagaatctgcgtattacctcaagtcgcatcgtggggtaaggggatggtggctacatattgatgttgtgctgttgctttttactgaaagctgctactaacgactcataaatctacccttaatcgtgtattggatgatagttgcggattttaggttcatgatattaccgaataaaattcttttatagtattacgaacaataaagacgattcacctattctctatcaaagatatttatgaaaactcgcaaaacaacaatcgttcaattaaaacaatgatatgtttattcatctaacaatgattcttattgtacagccaacaacgtcaattcggtggttattccagattgcaccgcttttccgtcaatcactatcttacagggggcagaagaaagaatataccattttccctgcttcttttcgagcagcacattagcagcctccgaagtctggatactgatactggatgcaatcagttgcgttccgttccctataaacagcgtccggtttcccgcatattcgttactgattacggcatagtccgctttcactttcattccctgataggttgcggtctgcgacgaatccgtcaaagagaaaatatggtcagtacgcccgtttttactttccacacagataccggcaaaatctttcaagccgggctcttccgcatcaaagtaagagactgactgaatagccgaaggctctttctgcgtacttggttcataaacagcaacaaaaggacggttccacgcttctccatgctgccgggcaacgaaggtgagagttggctgttcctttatattataaggcatatggggagtccggctcaatccttcggtcatcggtgacagtgcggtgaacacttcccgttccggttctcctttcatccagagattcatggaaatatcatctccgcctttatccttcatatcgatggtaaaagtcactttcacatcctgaccggtggtagccactttcttatcatataagtaggaataagcataaagatgggcacctgcaaaagcaagttcttcggtaggctgcaaattcaagtccgtgccatcggcagccgttagtgtcattgtctgacctagattatggtagaaataatcgtgcattttatcgcctccccgttctttccggctgcggaatacatccacataataccctgtctccggaccggtagtaacaatgcccatcagtcgagtctgatccgccctgctctccggctcacggaaagctacctgactataggtgacggaagtaaatcctttacccggttccgccgaagccggaaaacaggaaagtaaatcgaaagaatgattacttttcatcaccggataactggaaatgccatctacacaaaccgtattatgactggggaattgagagtaatattccgcatagtccagaccgctatacaggaaaagtccgatacccgcatccggtcccagcacgtatccttttccgtaaagctccatcgaaatgccattcgcgtgcatatgattgccttcacttgcgttgagagaaatcatcagactgttgcgcggatgcatcccgttgcgctgtaccagccacgatacgttgggggcatagaacagaggagatacataatcctcgattttccccgcctccaccttcgggtccagcaccaacggcttgtcctcaaagaaggagttgacagagacccgtacattcttcttgccacttttttcgctgccttcctccggattcagacatttcagcaaagcggtgaagtaacattcctgctctttctttccgtttgcctgcgcattctgtatcattcggataaagaagttcgtacttaagtaacttggatgcgtatctccgaaaccacagatcatccggttcggaaaaagatactgcggagtagtcgcaactgcttttgccagcacaggcattgcctttaccaagtcatattgcagattgtggtcaaactgattggcgaagttcgcgtagtcattgatgactacactgctgtatcccggacattccgcccatatacccgttttggagtcaaagccgtaatcggccagcttggtcagactccactggcggatgctcgaacggttcattacgtagtcaatatagtattcgcgtccttttccgtccgcatactttttattgtcttccagcaccagtcccacgttcatgatatatcgtgcctgcaataaatcccagttgttatgggggactccgttggcgatgatattatccgcccatttcttcaatgcgcctgcataaatcatcatcttatccggatagttggattgcagataatgatagaggaagtcatacagaggaacaacgatatgcaaagcatcctcatggatcacttcaaaagaagtcagccccaccagtgtctgctgatgcccgtgattcaggtcaacaggaacatttctgtaatagattcccgtcatataagtatcgaaaacaccggcagccagtcgggcatacttttcctctcccgtcatccaatagaggaaagcggcgtcacgggcaattcccagaatctcacagttcagactttcaatattgcgtccggtcttggacggatgcacactctccagcggacggcctttcagggcattgttgcagaaagtcacgtttccttccgcactatcgtcataaggtactacatcttccagcttaggacgaccgtgcgtagcggcggtcccccgtgttccggtatagcgaaccgtcggggcaggtgccttcgcgcctccggcatgatcgaacacctcgcctttcacatacacttccgttgcatacgacttccagtacatggccaaacgggacaataaccagtccggctgactttccgtacgtcgtgtatatacttccgtccgttctttcagcttgttaaagacatcttgtgcccatgcttccttcttgatcaacttccatgtttctttttttccttccggggtagtcagtactctcggatgatcctgcggcatcttctccggcaacggaatctcctgcccgtgcgcattcaggaaaaaaagcacacataatcctaacaaaattcgtctcatacttccatttcttatttacgtttgctacgtatttaatacgaaaataaggaataatttacctaactggtatcagaaaagctgtttttattttcagcggtacggactgctttcatactccggacattcaagtatactcaaaaaagatagcctgcaagcataccacttacaggctatcacaatccccttttttccctttgtatcagggaggcaacttacgtttccccgtccccgccggaacctctcgctgtacatccttgccatcgagctatataaaactcatacaaggagcatttccccattcagacacagtaccgacaggtccccataagccactccacaatgttcttgcgaatctccccaactatcgttggattcatatgggtatccgccctttttcgatgcgaagataatttttttatgctattattatagttaacactgtctattaaaagtgttaaaaataaagatttcataccatacttccgcaagccggcaccaaagaagaatatttattttccctaaacaaagcgctaattccgaacaaagaattatatttgcagaaatctaacaattctgatacttatgaaaatactatctatccatgatttgcaaataatcaggaagagagcggagcaccatctttcattgcgcgaagaaagtaatgaaaaggtttccgaaaaatgttgcgggctggcgtccggaacagcacacctccagattcttatttgcggaggtaccggttgtaaagcctcttccagtcagggcatcactgaaaatcttcaaaaagccattgaaagaaacgggataaccgacaaagtagacgtcatcacagtaggctgcttcggcttctgcgaaaagggccccatcgtaaagatcattcctgacaatacgttctatacccaagtcactcccgaagatgcggaggaaatcatcagcgaacacatcatcggaggacgaagaatcggacggctgctctacatagacccgaagaccgaacaaaccgtcagtgactccaaacacatggacttctaccggaaacaactccgcatcgccttgcgcaactgcggattcatcgactccgaaaatatagaagaatacatcgcccgtgaaggatacttcgcactggccgactgtcttctcaacaaacagcctgccgacgtcatcgacatcatcaaacgctccggactgcgggggcgtggcggtggtggtttccccaccggcctgaaatgggaatttgccagtaagcaggtatcggacgtaaagtacgttgtctgcaacgccgatgaaggcgaccccggcgccttcatggaccgctccattatggaaggcgacccgcactctattgtagaagcgatgtgcatctgcggttactccatcggttcctccaaaggactggtctacatccgcgccgaatatccgctggccatcaaccggctcaaaaaagcgattgagcaagcccgtgcatacggattactgggggagcacatcctggggacagatttcagcttcgacatagagatccgttacggagcaggcgcgttcgtctgcggcgaggaaaccgccctcatccactcgatggaaggaaaacggggagagccgaccctgaaacctcctttccccgccgaatccggttatctgggcaaaccgaccaatgtgaacaatgtggaaaccctcgccaatattcccattatcctgaccaaaggcgccgaatggttcgcctccatcggaacggaacgctccaaaggaaccaaagtcttcgctcttgccggaaagatcaacaatgtcggactgatcgaagtaccgatgggaactaccctgcgggaagtaatctacgaaatcggcggaggcatcaagggaggaaagaaattcaaagccgtacagacaggcggcccgtcgggtggctgtctgacggagaaacatctggatactcccatcgacttcgacaacctgctggcagccggttccatgatgggatcgggaggcatgatcgtgatggacgaagatgactgtatggtatccgtcgcccgtttctatctcgactttaccgtcgaagaatcctgcggcaaatgtactccatgccgtatcggcaacaagcgcctgctggaactgctgaacaagataacggaaggacggggcacggaaaaagacttggacacgcttgccaccctcggacgggtgataaaggatacggcactctgcggactgggacagacgtccccgaatccggtactgtctaccctcgacaacttccgtgacgaatatctggaacacgtcagagacaagacctgccgcgccaaacaatgcaagtccctgctgacctataccattaatccggaactttgtatcggttgccacctgtgtgccaagaattgtccggcggatgccatcagcggcttggtacgcaaacctcatgtcatcagccccgagaaatgtatcaagtgcggcatgtgcatggcacgttgtaaattcaaagctattcttgtctgctaaaatctactgctatggaagaaaaacaaattaccctccagatagacggtcactttatcaccgtacccgaaggaagcaccatcctcgaagccgcctgcaaaatcggcatcaacatacctacgctgtgtcacatcgacctgaaaggaacctgcatcaagaacaatcccgcttcctgccgcatctgtgtagtcgaagtggcaggacgccgcaatctggctcccgcctgcgctacccgttgcacggaagggatggtagtgaaaaccagtaccctgcgcgtgatgaacgcccggaaagtggtagccgaactgatcctgtccgatcatcccaacgactgcctcacctgtcccaaatgcggcaactgtgaactccagacactggcactgcgcttcaacatccgtgaaatgccgttcaacggcggcgaactttctccccgcaaacgggaagtgacctcctccattgtgcgcaacatggacaagtgcatcttctgccgccgatgcgaaagtgtctgcaacgatgtacagacagtcggcgcactgggagccatccgccgcggattcaacacaacaatagcccctgccttcgacagaatgatgaaggatagcgaatgtacctactgcggtcaatgcgtagccgtatgtccggtaggcgcactgactgaacgggattacaccaaccgccttctggacgatttggccgaccccgataagatcgtaattgtccagactgcccccgccgtacgtgccgccctgggagaagaattcggcttgcctcccggcacactggtaaccggaaaaatggtttacgccctccgcgaactgggtttcgactatgtattcgataccgactttgccgccgacctcaccatcatggaagaaggttccgaaatcctgaaccgactgacacgctatctggacggagataaatccgtccggcttccgatcctgacttcctgctgcccggcttgggtaaacttcttcgagcaccacttcccggatatgctggatatcccttctaccgcccgttctccacaacagatgttcggctccatcgccaagtcttactgggcagagaaaatgggaatcccccgcgaaaagctggtagttgtctccatcatgccctgtctggccaagaaatatgaatgtgaccgcgacgagttcaaagtaaacggtgtccccgacgtcgattactccatctccacccgcgaactggcacgcctgataaagcgagccaacatcggctttaccctcgtgctggacagcccgttcgacaaccctatgggagaatcgaccggcgccggtgtcatcttcggtacgacgggtggtgtcatggaagccgccctgcgctccgtttatgaaatctacaccggacagccgctgaagaatgtcaactttgaacaggtacgcggactgagcggtgtccggcgcgccaccatcaacctgaacggatttgaactgaaagtaggcatcgcacacggactaggcaacgcaaggcacttactggaagatatacgaaacggacataatgaatatcatgtcatcgaaatcatggcatgccccggcggctgcatcggaggtggcgggcaacccttgcatcacggcaactcggacgttctctacgcccgtgccaacgccctttaccgggaagatgccaacaaacctctgcgcaaatctcacgacaacccctatattcagaaactgtatgaagaatatctcggcaaaccgctgggtgagaaatcggaaatgctcttgcacacgcattatttcaacaaatcgattgattaactttaaacaagtactattatgtcagatatcaagctagcctgcgatgtggtggaacaagtcaagacgatttgcgacaaacacgggaacaatacgggcgaattaatcaatattttgcatgaagcgcaacatctgcacggctatctgcccgaagagatgcaacggatcatagcctccaaactcagaatccccgtgtcgaaagtctacggagttgtgacattctacaccttctttacaatgactcccaaaggaaagcatccgatttccgtctgcatgggcacggcgtgctacgtacgtggttcggagaagttgctggaagagttcaagcgggtactcggcatcgaagtcggagaaaccacccccgacggaaagtattcgctggattgcctgcgctgcgtaggcgcctgcggactggctccggtagtgatgatcggcgaaaaggtgtacggacgactgcaaccggtggatgtaaagaagattatcgaggaactggaataagtctctcctacccttcaaaagaggatgtgacgtatcgggtacccgatatgtcacgcatcctctttggggtcatatccccacttcacataaaccgctccccaggcaaatcctgcaccgaatgcggtaaatatcagattatcgcctttcttcagtttcttctcaaaatcccagatgcaaagcggaagcgtgccggcactggtattgccataacgttcgatgttgaccatcactttctcggacggtacttccaaccgttgcgccacagcggtaatgatacgctggttagcctggtggggaatcacccaatcaatatcctccttagtcaagtggtttctggcgataatagcttcacaggaatccgacatattcgctacggcatacttgaacaccgtgcggccttcctgataaatataatgcagatgatgatccaatgaataataggaaggaggacatacggaacctcccgcttttatatgcagaaaaggcagccctttaccatccgttctcaacaccgaatccatgatgccgacctcttccgtagtcggttccagcataaaagcggccgcaccgtcgccaaagatagggcaagtggcacggtccgtataatcgattacggatgacatcttatcagcacctacaataataatctttttatatttccccgaacggataaaattcgctcccgtttccatcgcatacaggaaaccgctgcaaaccgcctgcatatcgaaagcgaaagcattcttcagccccagcctttcgcacaagatagatgccgttgaaggaaaacggtaatccgaagtagtagtggcgacaatgaccagatcgatatcatcgggacgactctttgtgcgttgcatcaactgcttggcggccttacgggccatatacgaagttccaagcccctcttcattcaagatatgtcgttcttttatgccgatacgccccatgatccattcgtcggtggtatccaccattttagaaatttcatcattagtcagcacataatcgggcacatatcccccgaccccagtaattaccgcatttattttatccatcaagtctattttcagaattacaaaaatgtgatatctcaaaaaaaatatcgggcgcaaatatacagaaaagagaatgatatacaagagaagagtactagaaataccagacactttgacctatgaaaagaacttttggctaaagaacgagaagttttgactaaatttcagattcagcggagagagcgggattcgaacccgcgatacacttttggcgtatacacgctttccaggcgtgcctcttcaaccactcgagcatctctcctttcaaaaaactcaataaacactaagaaaacgctcccgttttcgtttcacaacatcggaggcgtcgccctccataaaaacaaaaaagcagcccaaaagctgcttttcagcggagagacagggaacgattaactttaaggttccttactcattatcagcatcttacataaatcctcaattcctatgacaccgcataattcaccgcatatatgctgcaactttcttcctgttacacttttacttacttttgcaaatatacgaaaaaagcagtataaatacaaattcatcacttgatttaacgaagataacttctataatttttttccaataccgattgcaatttggaaagaggataaaggaacttgccacctataacagtataagctatccccttttcatcctgcaacttttgcaaagtcctgcttgatatatgtaacatactacatacctgctcaccagtcatataaacctcattagctacaggaacctgcaaattctgaaattcaagaatttcctttgagcattttctaagcatcctcattatcataatatattcttctgattgttttgtaattaccccatccatactctaactctatttatggatattcagtaaatgttcctctttcttctaaattaagaaaaaagttttactttacgtgagcttttctcttgattttttcgttcaattctcccagtcttctatctttttcatagaacattatttacatattcttattttttcttcccacccatgcattatgtacatatcttttttaggggaagttaaaacctctcctcttttcctcttattttagtcagattatgctgcctttcttttttttcttttcgaccttttctatcatacataccgcattggctgtatgtatcccaaagaaaactcaaagtacttccgttttcctgtttctggcttttatcctggccagtgaataatgttgtttctgcgtttcaaaacttccttccaggcgggtagctctttcacggctgagttccgaccgtaagattctccgaaatcgctcatctttggcggctctgcccttacgcttggacaatagggcattaaagggcagatttcccgtatatgcgcctccttattctcgaattatgggcgtaagtcacatggttatgaagagatatctaccctttaatggggagaacagccggctaatatctgatggaaatgcccaacaaatcacaggaaaacagccacgcaatagtctgatacacaataattattggagatacgtggtccgctcctgcggacagcaagttgtcttttgggtaaacgaaaaccagacggtttaacagcgcgttacgccgttaaaccgttagcccttccaagctccagagtcgcttcatcatataatttgatagcttcacctatattatcacttgggacgtttaccaacagactccctttccctttttctgttcgatgccctacaaaaaggctgtttgcggccgcttatttccgtttattttcactatttttgcagtatgaaaatgaagacagacgatacattcaatcatgcccatgccgacaggcttctgctccccaacgcctcattgcttggggaggtggagaacatgctggccgacggacggtcggtcatgctgaaggctacgggaaacagcatgctccccttcattgtcggagggcgtgacagtgtgcttgtacggcgtccctccgggatacaggcgttacaggtctggcaaatcgccctggcacacctgcccgacagccggtatgtgctgcaccgtatcgtccgcatccatggcgcggagattgtcctaatgggcgacgggaatctaaaggaaacggaaagttgtcggtttcccgatataacgggagttgtcacaagaattatccgtaacggccgttatgtggactgcgacgcagggggtgaacggtgcaaggcgaagatatggggcaggctgctccctattcgccggtatttgctgtacatatacagacgggtatggatatgaaggcgggaatgagtatgaaagaaggagcggaatggctgtggaacgcctcacggggatatcgctcccccattctggcgggtattcttgccgggacagttcgcatcggcgtgtccctcacgttcgtctggttctgcaagcacctgatagataccgccacccatcaggcggacgggaacatcatcctgggactggcggccatggcgggatgcatcgtcctgcaactgctgctgtccgcacttgtcagccgtctctatgcgcacacggagatcagcctgcgcaacagactgcggcaggatctgctcgaacatatcctgaaaagccggtggaacggtcgcgagacattccattccggcgatatgctcaaccgcatggaggaggatgtccgtaccgtgacggacctgctggcgggttccatccccttggtcggaaccacgctgttccaactggccggcgccgcgctgttcctgttctgtctcgaccggcggatggctgtcgtcatcctgcttatcatgccgttggcgttgctgtgcagcaagctctacatgaagcggatgcggcgtctgacacgtgagatacgggcgacggacagccgtgtgcaaagccatctgcaggagaacctgcagcaccgcaccctgatttccgtcctggaatgcaccccggtggcagcggacacgatgtcctcactccagtcggggctgaaacggctggtgatgcggcgcaactcattttccatcttttcaagtatcatggtgcaggcggggttcgccctcggctatgtgaccgctttcgcatggggaatatacgggctggacaccggtacggtaacattcggcacgctggccgccttcctgcaactggtggcgcaggtacaacgccctgtcgtggagctggcccggcaggttccggtgtttatcggcgcactgacttccgtggagaggatagacgagctcaactccatgccgctggaggaacagggcgagcctgtcatcctgggtggcaaggctggtgtccgtgtggagaatgttacttttacctatcccggcggcagacgtaaggtgctggaacatttcacatacgatttcaagccggggagcctgaccgccgtgctcggggagaccggcagcgggaagagtacgctggtacggctgatactggccttgttgcagcccgacgggggaaacatcacgctgtatgacaagacccggcccgtgcccgtttctccactcacacgggggaatttcgtgtatgtcccgcaggggaatacgctcgtcagcggcacattgcgcgacaacctgctgttgggcaatcccgaagctaccgacgggcagatgcgggaagcgttgcatacggcggcggccgattttgtacgggaactgccgcaaggactggacaccccctgcggcgagatgggaacgggcataagtgaggggcaggcgcaacgcatagccatcgcgcgcggactgctccgccccggtaacatcgtcctgctggacgagcccacctcctcgctggattccgataccgaacggacgctgctggaacggctttcacataccattcaaggcaagaccctcatcattatcacccaccaggaacagacggcacggctctgtaacgccgttatcaggatgcatccggtgggctcccccggcaagtgacgcctacgtgagactgcgggatggccgggaacggggccgatcgcgcaggtataaaacagggatattcagtaaatgtctctaaaaaataagatggcatatgaagatgatagggcatgaccatttcatatgccattcttattgtcatttttccgtgctttctcacataattctatccgacaggacatgacgttccggaagaagtctgatgacctcttctgattctgtgagtaaaatcatatcatgctgctttagctgctttgtttctgattttttctatcatcagtatggcatttgccgtatgtattccaaagaaaatccacagtatttccgtcttcctgtttctggcctttatccttgagagcgagtaatgttgcttttgagtgccgaagcttccttcaagccgtgttgccctttcttttgagagttcgcttctaagcaccttcctcaaaggctcatctttggccgcccttcccttgcgcacaaaggatgtggatatcccatattttgtacagaactttctgttggcattattggcatatatggaatcggcagccacacatcttacccttacattcataagcttctgctgcatacggatacagtccttcaagcgtataccctcattgaatgccttgaacgagaggtgttcgatgaacgatatgccgtctatctgtatattattgacctttgcaccgaactcgacggacttggtttccttgcctctgacaatgggacgtacataatgacggtcaatgctgacgatgcggtcactgactttccgcccttcaaacatttccttttcttgtacaagcacctttctgatgatggaaagacgcttatgataatcctgggtatatcggagtaaagcaccgtactcgctatggatcccatccctttgactgaggagcttttcaagaagcttgatcatacggcgcttaagcattcttgtccttgaagctctcctctttcttttcttgcagtaggacagataggattccgccacattcctgtatttgttgcgcggacgccttatgcccagctccctgcaatgccggcatatatgcctgtagagccattcgaggctttcccaaaggagtttcatgtccgtaggaaaacgcatgtggctttcatagcatgtggcatcggtcatgcagacgtgaaggttatcaagataaggtttccagtgtgaagccaggagctcctggaaagaatcaatgtcaaggcgggatgctatctcattacggatggcactgactatcttgaagttggttatgggaagggacgggggaatcataattccacagaaaatctggtagtgtatgttcccgttcagatgttccaccagttgcctgtcggagaatccggtgtatgccttcaggaccataagggcgatctttgcggaaggactgaatctgttcctgcgtcccaggcgccggtccgacaggcctgcggcttttgccatacattcaaacggaaagaccgaatgaagcttgccaagctcactctcattaaaactcttgcggtatttttccagaatatcaaattctgtaaaacccaaagtagggtgaatttctgaaacattcactatctttgccatatcttattagtttggatatttcccccgttttggccgtcaaaccttattttcgggggaatacctaaagatacaaaaaagccaactaattcgcaatactttgtgtatgaattagttggctgattttgtaatatttaatgaatgtccctaaaacaaaagcagggaagtccggggcttatcccggcttccctgccgacggggaggcggcatcattgctatgcgtgcagtccgactgccatatcaaactggttggatgttgagatgaaattatggcacgcatgcccgcttcccttcgtatataattccttatccggatgatacgccgcctcccgatgacggacagccgcggtatgaattccgataaatacggtattccaaatatccatatccgaaccacgcctggcccggatatggataagcaaacaaaacaaacaaatgatagcggatttaattcgtacagccggaaataccacattccacggctgtggtatgaacccgccaggggtatatattgttctgacagtgtgtcgtattcatggttcatacagttcctacagggcggaattgtccatgtcttgtgccgcacttccctgttgtcaatatcccggattttgcgtaagcgcgggcaaaaggtttatttcggattgcggaaaaggcatgagaagctcgtaggcttcgcatccggccacggcctgtgcctgcccggtccgtttcaacatgatccaatagccccagtcttgcttccgcgttttccattcgtccggcagggccgacttgtccgcagtgtcctccataccggcctctttgagcagcagggcggttttcgcgggtgtatagttcgcaaggctttcaccgaaaacgcggtacatttcgggctcggacgattcctcgaccgcaatgctgaaatcggactgacagtcgcgaagcaggtatcccgcctcgtcattgtagcccaggctcaaagcgatttcggcacggagggccttgacggtctccatagtgatgcgccacccgccttcggggaggttgtgtaaaaagtaagaatcaagtgttctttgacatattgtataaaaaggattttatatctttgctctgctaacaataggattaattttatgggctatattcaaccttttgaccgtaatcaactgactcttcccgagtctttagattcttatatctcttgtgagaaccctgttcgtctgattgatgtttttgtcgatcagtttatcaaattgcaccctgatttttcatcttataaaggtaacagtcctacgggccgttcggcttatagctttggtactttactcaagctgtatgtctacggctatttaaacagtatcagttcttcccgtaaactggagcgcgagactctgcgtaatatggagttgatctggcttctgggtaatctccatcctgatcataagactattgccgatttccgttccaaacaaacttcgggcattcatgaatgttgccttgatttccgccgctttctggtcagttccggttatatttcaggcaaactggtagctgttgacggcagtaaaatcaaagccaataccaatcgtgacggtcttactttagatggtattaatcgacagttagccttgttggatacccgtttagagaagtatctgcaccagcttaatgaaaatgatctggtggaaacagcccaggaacaattatccgaactctcggacgagccggtgtggagagctccctactggagaagatagcccgtttgagccaacaggttgaagaacttcaggcggaaaaacagcgtatgctggatgaaggttcccaaagaagctttccttctgaccgcgaagctcgcctgatgaagacccgtaacggttttgttccggcttacaatgtccaatcagtggtagattcccaacatcacctgataggtgccatgcaggttaccgaccacccgaatgactttgaagaccttcaaccttcgattcatgccatgcaggaagaccttcaggtagaagtatcccaagccgttgccgacaccggttatgctaatgaagaacagattctggcccttgaagaagaaggcaaagtgattgccgttcctttcaatgaaggagaccattctcctaaagaagatcgggagcacggaatcttttttacctatgatgcagacaatgactattatatatgctcccaagaaaagatattacctattaaagacaggcaagttcgtaaacatggaaagatttatagaaaatatcagggaagagactgcaagggttgtcccttgataaagttctgcaccacatcaaaaaaaggccggattatctaccgaagggcagatgccgaacccataagacagtatatgaagaagtgtaaggggatgaaatacaaagcgcttatacgtttacgaaaaacatgggtagaacatcccttcggaactcttaaatactggatggggcaaataccactcctactcagaggaaaggaaaaggtacaggctgaaatagatttgtacgcaacatgctataatctaagaagagtgactaacattcaaagcatacaggtactattgcaacaagtccactattggggtattaagtatacctaatagcggtcattcgccaaaggacaacaatagaaataccaaaataaagagataaagagcattgcctttttaatacaatatgtcaaagaacacttgattcttactttttacacaacctccgggcaaacgggtgatgtcttgcagttcattgagcagtccccaacaaaggtcttgcggtgaccgtacggggaatgcaggatttcatcgtaattgttggaagtggcgggcaccgtaatgtaaggcacactgccccacagttgtgacaggttgtaatagaccatgcatctcaaggctttcgcctcgttgatgtaagcggtacgctcataggagccgtcaaaggcttcaaggcatttatcaccatattggcgttgctgatgacaaggtaggccgcactccacacatcggccacatgactgtcatacggagtaatgacggacgcagggtgttcatcaaagtctttccccgtaagccttatcttctccagcagcaactgcctgtactcataactccgtaagttgctgtaaatgccaaggattgcattttgcacagctttcctcttcccagaaactttcttcctcgttgggatagatcggagccggttctaatacatcacaattgttttccacctcctttctcagctcgttgattttttcctcgcctccatcgtaccgggtaagcatgacggcggaatcaccatcggtgagcgacatgctgttgcccgtaatgcctgccaccgcgacaagcacttcccctactgcgagtttcatggtaagcagattctctacgagcgtgtattagaacgacatgccttccaccgtccatcccgtatgatatccggtcacatctggtattgacgagtaggtgtaagtcaccaactcccctgtcccttccttgtgaaattcaacggtataaatcgttccgttctcggtgctgtaccagtttccggtcaaaccgccctgcacgataacatcctcgtcggagtcggagcaggcagcgagtacaaaggcgcacgccatgaaacataaaaaagtgcatatattcatcataattgtataacagatggtttgtattcagatcataattcataataccatgtcaagaaatccttccggaatgacaattgacaggttaataattttttttctgacaaatagaaatgtaaggaagacagagtcttccgccttccttacaatccccgcgcttttcacaaaggacataggtcttaacatctttttactttcccggttatatttgttttccgaccgggaaacggaaatatgtggtctgtctgaaatccggtcttgtgtatcgaaatccgcgtcaaggctttcgcccagtctgacggctgaccagaatcggacaagttcctatatgaacaaatgttttattccccacgtgtgataaccgcacggctcaaacgcgggtcgttgtagaacatgttgtccacaccgcccttgtagtcgatgcggagctgtttctcgctgacgccgaactctttcaccaggcagtcgtaaacgttctcagcgcgttccttgctcaggcgttcgttgcccttgctgctacccgttcccgcatcggcataaccggtgatggtatatacggtttccggatcgcccaacttgatgatttcggccagcagacccaagttggcgcgcgcctcgttgctcagcttcgtcctgttgatcttgaaggtgacgaggttggcggaggcaatcttcttcacgatggtctgtgccttctgtttgtcgccatcggcaagggctttcttcaagcggtcgttctccgcgctcatgtcgttcagtttccggcgcatgctttccagatcaccataattgtaacggtaaacggtcttgctgcggtcccagctgcgttgcttgaacttatacgtcaggccgatggtggcggaaaggttcccctcaccgaaacggccgccgccctcaccgtcgaaacggtcgttgacgaacatgccacgcacgtcgaggttcagggccagtacgtcgcagaagtgccaggaggtcaggataccgaggttggcgcttacctccttggaagatggagagtcatagacacgtgcccagccgaggccggcataaggactgaggtcccacttacggttttcgttgtaaccaccgaaaaggttcagcacattgaagagcacatcggcgtggaggttgctcatcttgtatttggaatattggaggtcgtcgcccggaacgccggcccatccgggcacatgttcgcctgtcccgtgggtgatgtcgcattcccagtcatcacgtgtggcgcccttgcttttcagtccgctgtacatgaagcggataccgattcccggagtgaaccacttgccgatagcaatatccagtgccggggcaatgcggtcgccgaagtctatttgcttgtcatggtcaccaaaatacacctgcccaccggcacccacgctgatgaaccagttgtcccaaaaacggttggtttccaccttatacttgtccgtactgtactccaccttttctttcgtatcggaagtctgtgcgaaggccggacaaagagccactgcgcacaaggcggtcaaaaagattttcttagtcatattcaatcaactgttaatgatttgtttctttatattactcttggcactgatagcctccgaaaagtattgatgccaagaataagaaaatttcttgcttagaagcaagagccaggcttactgctttttcagccttacgacaaaggtgccgtgtgccgcaagcgagccggtcaacgatgacgaagcagaaagggttcctgcgtctttctgtccgataagatctcttgccgaataagattcacttaggtcaagagcatcgtagtcggccatagaaatggtgtaagttgcagaattatcgctgaggttgacagcggcaatcgccacatcgccgtcagcgaggtctttctgatagtaatcaatgccgtcagcactcttgatatactcggcgccctgccctaaggcatcttggttgatggcgataagctcctcgttcttgacaagcgcgaggtcgtgtgccaagtcggccgaactcatatccttggtcatgtcgaagcccagaaggataggagaactccacatgcaccacatggcaaacgaggtctcggcttcggttgaagtgagtccacccgcctgattgtaaacgcagtcgctcgacgactggccgctaccgcggataccgacgcaaatcatgtcggcatcattgtaacggttgattccgacatacggccaaaggtggcgcatcagtacgatggtgttgtgcacacccacgccgttagcattctcatcgccgtcattctttttaccaaacagaccactgtcgattttaccccaccagccgtcacggtggtcataggtcatgcgccagcaggtagcaccggtctcggcaccccacttccatgggtcgtggataccccattcgcacacgtacagcatcaggccgcggtcgttaagcgccttgcccatcttggtgtagagttcctgcgccatttcggacgtgttccaatagctacccagaccggcatatccatcaacgaaagtcgatggagtcgcaccgacaggagccatatcaaggtcataataccaatcttctttcacgaagtcatagccccagcccttatagtcctgtgcatggagttcctcgtagccgtacgatgcgaagtacttctcgcaggtcttggttccgcaatcggtgtagataccggctttcagaccgtagtcgtgaatcaggttcgccatgcgcgccatgccgtttacgccattcgccgtgggaaacttgcttgcatcgggaatctggtggccgttgtcgttctcacttttcacctgccagcagtcatctacgccgaagtatctgtaaccggcgtcaatgaggcctttttccttcattcctacaagctggctcgcgaggatgtcgtagccaatcttgtctttaaagacattccaggtctgccaacccatcatgggggtgggtgactggagatcggcggcccggacggccacgtggagcttgatgccttctttataggtagcgccccctacggtgaattccaccgaatagacatagtcgccggcggcgggagccttaccttccacaaggcagcggccggcgttccaggtcagtccctccggcaggttgtagacacgcttgacgccattctttacgggcacaaccgcatgatattgctgcgaggtgctttgcggcacgcggattttgtgcatgaagggttgccccgcaatggcaaaaacggtgttggcgcatgccagacggctctgcaggccggtcacccaagcggcgttctcctccttggcatcgggattctcctccatcgtccacttgtctttgaagcgcgacagggtgagaggtaccgtgtaataggtattggacttgaacgcatcggctttcatcgtctcggtgaaggtgatgatgtgcaggttggtcttgatctgaatgctgatttccgtccccgcaatgcccgtgacgggagccacgttcatgtagccgtggaaggtggaggcggacagttccggcgtatccgtccattccatggtcacggtggaggcatcggtggccggcgtgaaggtgacggcacgggtggaaaggtcacaagtgaagccgccgccgagctgcttgtcggggacggtgagcgacacgctcagcagcctttcacccgccacgtcggtgccaccggcgttgatgtcgaacttcaagaaggcgaagatgtgctcgaaagtgaatcttgaggcggagctgccttggggggtgcccaccttccagtcgccttccagttcgcgggtggcggtggaatagtgctgggtcagcggcagcgtgcccttgaaagccgtgggagcggtgcccgccgtctccgtatagggatagtaggcatacaggggagtctcaccgttctggagattacctgcgaaggaggtcttgtcggtctcctgatcactctggttggtgaagcaggcattggcagtcgtggcgctgtacacgccgatccggtcggctggcagccagttgatgccaatctctccggatgtatacgctgtgggatcgacagccgtacgtgtcgctggctcttcaagtgcaggagctgggcaaacagcctcgattacggtgttgcctcccggtgataaatcttggtcgtaggcattacaagctatcaggaatgccgatgcggccagcacggttattgcgtttgcaattgatatctttttcatctattttcttttctatagaattagtttgcaaggctgcacgggccgtgcagccttgcaggtaaaaaggaatcagaatacagtaccaccgttggcaatacccttcgtgtcacccgaaggctttgccttggcagcggaacggcgggcgagcttgaactccggatccgcattgtgctcaatcacggcctggatgccttgagtggtagtcgcctcagtgcctacgcagttgaacattacccaaccccatggcttcgctgccggtttgttgttgttgtgaagccaaaggttgttaagggtagaagcaacttgtgaaggatagtaatattcatcgtcagtgacgaaatgttcacgtatagcgccgcaacctcccaaataggtcatcgagaagttattatgtttggttgattcgtaattatcgctgtatgcggcaagaacggctgttgcgttgtcttgaatgccgcttcgccactcaagaccagataaacccttagatttttttatcggattggcacaatcagagtagatgatattcatgttctcggtcagagccgaagccgatgtgccaccggcattcttattaggttgagcgccataaggcatgggcgaataatacacattttcttcagcaacctcattaaaggtattcatccatacattggctccggacagttggttccatgcgtcggtgtatccgtcgttaagctgcaccttgacaatcactttccccttgacgtcaccgatggtggtgttgggattgataccggttgcaatcagtcccatgtcttcgactttgtcaagcacgactttcaggcggctgtacaaagtggacaactgtgccgtagttatgccgctaatccagtcggagatggcgagcacgcagaactcatccttgtgggttccggacatctccttttgcagtgctatcagtacgtcgccgagggtccagtaaccactgttgtcagatttcaatacgctattaccatcagaatcagcgatacccaccgacgtggagccgccatctatcgaggaggtctgagcgatggtattgacatggcactggaacacacgcacaccggcattgaactggtctttcaattccattgtttgagtcttcttgtatgtgtccgacatcagatagttgaacgacagcacggaacccggcaacgaaatctcggaaaggtagatgttcggatcgagctgcgacagccaaatcgtgtaatcgaacttcaaatctttaacgttaatcttcggaagtttcacgaagtgaatctgcctcggctcgaagttggtcatattcaaattcttggtcagagtccgtgcatctgcagtcacgaccgttaccttacacaacgtgacattcggattcggaatcatgaaggcgctcaccttgagctggctgccatcgtccatcatgacacccaccctgtcgccagcttcatcggcgaatttagtatcgatcgtaatgctgttcgaggcgtcgtcgccgaaggtaaattcctttgatttgtaatcgtacgtaaagctaccggcaataggagcgtctgcctcgatgatgacagaggtgacgcgcacatcactctgcgtattgttcttgatggtgccgttcacggtaatgtcaaccatcgatgcgaagggttcgaactccagattcacggtcttctcggtagcgggattataacccgttttcttcgcgatcatcagcgcgcagtccatgtcagcggtagtctggaactcaccaaccgcttcgtccgtcatcacttccgtggtggaagccgtctgtctgtcgggcattgtggcagaaagcgatgtgtccttgccgctacccgactttacagcctttgccggatacatggcatagaaatcgtaattcgaaacgccacttgtctgcacaccaacatcgccgtccttggcaaccggagccggccctaccatgtccttcgtggcctggacggtgtacgaagcctgattggcgcttgccaacgcctggggggaatagatgtagatgtggtccaaagaagactcatagttccagaaaatcttccaggaggtagcgtccggatccgccacatccgcgggatcgtaataggtgcgcgtccggttagactcaaccgtggtgccgaaatcgaattccgtaccttccggcaggggatcgctacccgacatattgtcatctgtacaaccggcaaagcttaaagccagcaaagaccaagcaagagccggaatcaaaaatctcttattcatattcattcagattatgttcttattcattagttattatcccaagaatcattagtaaagtcattcgctgttccaaaagattggttgacttcctgagccgtagttgttgtaccgggcgactgagccgtgtgactagtagagccgcacaggtttccttccaattccacctgagttttcttcgtggaaggagactcgtaagtttttaagcctttgttttcattttcgtccatatactttaatgttttaaaaagttaatgtatccttatttagtgataagctgccttatacggcttccgtatagggcagcatacgcccccgtatctgtaagggaggttccgtcatcgcctccggacttgtcccgggacctcttgacggggctgtgccggcatggattgtcttttccggccacccgttaatctgatacctgatttcttgtgtcataatgtaattatatttaaaaagattaaacgtaaatgcttgaagtatatcggtcatttccttctcccgtgtttcccgtatccgtaaccatagccatacccgtatccatatccgtaaccgtagccacggcggtgcgggcccaccccgttgaggataattgccatgttgcggagcttgttatcgcggtaaagctcctccatgtcgggcagcaggcggcggtccaggcggccggcgcgcaccacgaagatggtgaggtcgctgatgcggttggtgatagtggcgtccgccacgatgcccacggggacattgtccacgatgatgtagtcgtagcgttggcgcagttcctccaccatcgcgtcaagccgttcgtccatgagcagctccgcagggttgggtgccaccgtaccagatgagatgatgtcaaggttgtcgaatttcccgtcggtgtggatgatgtcgtccaggcggatggagtcgtcggccagatagttggtcacgcccaccgggtgtttatggaagtggcggctcagggtgcccttgcggatatcgaggtccaccagcaccacacgtttccgggtgagcacgaggctcatggcaaggttgcgggaaatgaacgtctttcccgcaccttcattaaacgaagtgaaggtgacgacttgcatcggtttgtcttttttcaccatgaatgtcatgttggtgcgcaggatgcggaaactctcggccagcatgccgtcttcctcgccgacggcaacacccgctttcgccgcctccttgtcctgcggcacttcgccgaggaaaggaatgctcaccgcgcccttcaggtccttgcggctgtgtacccgggtgtccatgaagaggatcatgaggaacaccacgccggggacggccaggccgacgagcaccccgagcagcaggatgcggttgcgcacgggtgagatgggtcccgcgggtccgtccacgctgtcgatggtgcgcgcgttgttgtcggccatcgcctgcgagagggcgttctcctcccgccggttgagaaggaacatgtagagcgcctccttgattttctgctgccgctcgatggagagcatctgccgttccttggtgggcacggtggtaaaccgcgcctgtgcctgctcctggcggctgcgcgcgtcgttgcgcttcatgttgatccccacaatcatgttgtccaccgcacggatgatactctgcctcagggcgtgtatgctgttgttaagctcctccaccacggggttgctctcgctgctgtcggctatcagcttgtcgcgcttcagcttcagggcgttgtactggtttatctgcccctccacggcggcgtcgctgatgcccgtccccgaggggatgaggtcacggcttttcgtggggtcggtgaggtactccttgatgaaccgcgccagtttcagctgggtctcctgctccagcgcgtcggcgctgtaggcctgtgcctcgcccatgtagcggccggccagcgagccgatgtccatcacctggttgtgctgcttgaacgattccagctcggtctccacgccgccaagctcccgctcgatgatgagcaggcgctcgttgatgaactcggaggtgttcaccgccacctggttcttgtcgttgacggcttccgcgttatacacgttcaccagcgtgttcagcacgtcctcggcacgcaggggcgagccgtccttcagcgagagcacgaggatggacgactcgtcctcctcctgccggattcccatgctgccctggaggcgtcccgccacggcgttcagcgggttcttgacgacgtggatctcgcgacccgtccacgacttgccccagtggtcggtacccgtcaccaatatccgctcgccgccgacggccagcgtgtcgttcagccgcacgtcatagctatccttggcggcaggcagccccccgaacccggaaagcgtcaccgtcgcatcgtccttgggcgtcaccacgaacgagatgtgccgttcgggcagcacgttgatgaaggagacgttcaccggagacagcgtatagagctcgttcatacgcagcccgctctccacacggtagtccacgtcggcgtgcaggcgctgcaccacctcgcgcatcagccgtttggaacggaactggagaatctcgttggccacgttcaccttgttgatatagttgtcgtagcggtcgagccccgccgtggaggtcttgttggacgggtccttgatgatgaccgtgacggagcggaagaacaccagcggggatttggcgtagtggtaccacgccatccccccgaaaagcagcacggacagcacgaaccacttccacttcgacagcagatagacggacaggtccactaagttgacgccctgttcgttcttgttggataaactgttgttttgcataattcagagatgtgtttacttgatggcccagatgacggagcagacggccgtgatgaacgagaggattccggtggtgtacttccagcccttgtcctcgcggtcctgcttgcggtatttcggttcgacatagacgatgtcgttctgttgcaggtagaagcagggcgactcgaacagctccttgctgcgcaggtcgtgctggtacatcacccgctgcccgtcctcctcacggatgaccgccacacggttcacccggcccctttgggtgacatcgcccgccttggcgatggcctccagcagggtgatgcggtcgccctccaccgagaaggtgccggtgttgcccaccgcgcccaggacggaatacttgaaattgaggaactccagcgacaccagcgggtccttgatatacttcccgtcgatgatgcggttgcgtatcagggcggtcacctcgctcaccttcagcccctccacatgcagcttgcccaggatggggaaactaatgttcccttccacgtccacacggtagcctttcttcacggcagcggactccgtcaccgcgccgttggcacccaccgagaaggccccgccgcccgcgttgaacgggatggacagctcggggttcttgctgctcacggtgatgtccaggcggtcgttggcatgcaccaccgcctcatacctggtgtcatacggatagccgagccccatctccatgtcctgcaggtagacgaatttcttcgacgaactgcaggaggagagcaggagcactgccaccgccacaatccaaaaacagtcttttcttttcattgctttctttgctttatttagggtttatcaatcatcgttcatagtccgccgttctccggcaggccgtcccgtacttcccgggctttcgcatcccgcacgtacaggctctcgaaacagagccatgcggcctcccggtcgggcaggcattccaaccgtccgacgggcacctgttcggttacccgtatcaggatacggcaaagttcgtcatgcaggcggatgtcctgacggatggcggagcaggagggcagcaatgcggcgaaagcttccggcccctcaagcggggtgaaccggttcctgccggactgttgcaggcggacgattccggccacgggacggcgctcgttcctgtagcagggtgtcttcccgctccacggcgtgccgtagaccgataccatgccgtcctctatccgcagcacgggattgtcgtcattcagcaggcggcagtccggaaaggcctccagccattgccgggagtgcgtgctcttgcccgtgccgctcttgccgaggaaaaggtagcccctgcctttcaggctgacgcaggaggcatggacggaaacggcgtcccgcccgagtgccgcctgggcgtagaggatgcggagcatggacgacagtacctcccccatggacgggtcctccacccggaggaaggccgtggcatcgtcaaaagcagtgtccacagtcatgagatgtgcgccaccatccatagggccgtaacttatctccgtccggtaaccgccgggaatgcgcagaaggcatacatgccccatgtcgttggacgactcgtccagcagctccgcgcgtttcccgtcatccgcaaagggacgggtgtcggcaagcagccggaaaatccgttccccttccgggcattccccgcaccggaacggacggaaggagggcagcagcgtctctgcgtccagcccaccgggaaggatgacggagaatgtcagccccgccaccctgaaaaaatattcgtttctcatctgaggtttcctattatcagtcttaccgaaatccagaacgcctccttgcgggcgtaggcgctggagaagccgcggtgtttccagaaggagaggaaggtacgcagtttcctttcccaccttgcctgggaagccttgcccttggtgccgccgtactgtccgaagttccctccctccagcacgatgcgcagcagttcgggagaggaacatgcatccgtatccgcataaggaagttcggcgcgatgcagcccgaggtattccgtcaggaatgtatggagctgcgcgctccacctgagcaagccggtccgcctgtaaacggcttccagaccctcgggggagtagcttccgcacagggtgtggtaggcccgcgccatgtcgcagaactgccgaaggccgacaccgtgccccagcaggtgtttcaggaggtgggcgttcagcaacagcaggttcggcaggggcgacggcacggagattgtcgctgggaactccccggactggttgccctccggcagcccgtcccttccgcccggacggaactccgtgaacccgtgttccctgaccagtgcggaaaggtagactttcagcaacgggttatgaaggtcgaacagccgggtatggtgttccacctccactccctgccagctgtaacagttgcttccgtccggctgtttctccgtccggcacccgacccggcgcatcagctccgcggcttcccgttcctcctcttccgaaaggaaacagaggtcgatgtccccgcattcgcgcgtcagcggatgttcatagaaggcggccacgccctggcctttcagcagtacgggatgcaggccgttacggcccatccgttgcgccagcaggcataccaccgcgtccatcctcctgttcttccgctcgatgcggtcggtctccgccacccaacgtatcatcagggcgtcgccgggcagcagcgcttccggcaggtggtgcaggccgcggcagacaatgcccgtcacggtctggcgcaccgccatccggtacacgttccaccactgcgcgtccgtaagcgggaagggtgacaggtcgtccggctccctctcccacagccccgcacgcagcaggctgaacaacgccttatgttccgaagaaagctccatggaatccgttttctaaagcaggcactccggtaagggatcacaagatgcctttgtcctttcagtgtaagcattcaatcgccggtgccccgccgggacagcagccccatcttctcccattcctctatctggcgttccacatcgcgcagggcgcgcccgtattccacatcatacgtcttgcagagtccctccgccagttcccccgctgtacggccttccccgttgcagaccatctcccagagccgggcggcggtcccgttcaagctgtacacgttcgtcaggttcacgcaactgtcggagacttccacaatcatgtggcggttgcctatcctgcggagtttcaggtttgatttaattttcattacgcaagcatttttctgagtacccttcatccataactgcacatgacaatgatttaagatactccttatgtttcggatataattttcgttctataatcagatatgccgtaaccaaaccgatggtaacaattacggagtacagccacttgtcaatcggcaggtatatatagcctaacgatatggccaattgcaaaagcacataagtaatagagactgtcacatgtgaatgtcccccttcattagccaacaactgaaacaggtgcttgcggtgcggctgaagcaggttttcgtgcaacagcaaacgatggaaaatcgtcaacaccgtgtcaataccgtataccaccagaaataacagataagtgacattcccggtgaaaagcaccagtttcagcaaaataaagattacacaatacgccattcctacagaaccgacatcacccgcaaaacagatggcctggttcctgaaattaaagaagcagaataccaaagcggatatcatcagcaattctatcaatgtggcatctatgaaagccatttccctgttgagcagccagaaagtgaacaataccatcagactgaatgctccggtcataccgttgattccgtccatgaagttgtaggcattgatgatgcaaacacccagtatcatggtaggcagtaaaaaccaaaccttgttttctacaagcattccggcttcctgtaatagcaggaacattgccacaaactggacgaaaaagcgaaacctgggagacagggaacatacatcgtctataaaagccacactcgcaatcaaggtcattcctcctatgaacagaggataaccggtcgtattcagaaaggcatacatccagactcctaacagaaagatgatacctcctccccgtaatacgttcttcttgtgtgagctgcgttggttgggacggtctatgatgttgaatctgtccgcaattctcagataagcgaattcaccggcaaacagcaacaacaatgcaactaatcgttctataaacatatatctttagattttagagtttacttttcatgatacagggaagcgtacacttgttcatatccggccaacatacgttccttgacgaacatcttgttataatgtgcacgtgcctgacgggaataagtgcggtatgcctcttccgagcttgtaatcttcataatggcttttgccaaggcttccggattctccggttccacattaaggccggaatatccatttctattcacccagggaactcccgaaccttctatattggtcgccaccacaggcttaccacacgacatggcttcgatctgtaccaaaccgaacgcttcggttttccatacggaactcaggcagaacacgtcacaggcaccataatattgcgccacttcatcatcggtaacatatcctaaaaggcaaactttcccttgaagattctcctcatttatctgtttcaataatttgttgtatagaggcccggtaccaccgatcaacacaacataaccgtcatccaaatacctagcggcctctataagaaagcggaaccccttgtaggcaatcagacgtcctaaagcaaatatgattcttttccctttatattgttttctgatatcgctaaccctatctgctgacggaactatggcctcacaccccaaaggaacgattctgaacttgtgttccattccgcgcaaaaacggtgaattctctagatataccggtgacgtgccgattatcacatccgccctccttatcaaccatgtctgtaacggcttgtaaagtttcagggcatatttctgtttcaatatgtcgctatgccaatgcaatacgaccttacctctgtaaccggacagataaagtgccagattggccataggattcgggcaatgaatatggataatgtcgtaattcgggcaaagctttctgagtgtgggtatcaataagggggaaatcctcactgaattgacattacaaacagaaggcatggcataaatatgggcgtgttcatttaacggaaacacaccggctttttctgttgaaacacataacaggtcacacgtgacgccttgcattgagatacctcttacaatatccagtatggctttctccattcctcctttcaacggatagaattttcctagatgtagaattttcatagcagattcaaatggaagcaggcagtaatttttcaaacagttcccgccatgaacacacatagagtccctttatggcagtcgaaggttgggatgatagagacctatgatccccctccagcatttctttcataagtcttttcaattcttccggtttgtgttcattgaagtagcctacggcatgaaagcccgaagctgtagcatgagcataaggaagatctgcaagtaacatgggtttgcccgtttcaccgaattcggaaatcggcaagccccaggtttctactttggaagcatgtaccaaacaatgtgcggcctgatagtaaccatataacttttccttattcatatatccggcaaactcgattgagttcacatcgtgccagtttttataaagccagcgggtataacggttttcttttccggacagcgtgaccaccactttaaaacagccttttcctttttccttctccaaaagcctggcggcctgacataatacctcgaaattcttgtgacagtccggtgcggaagcatataggaatgtgaaacaaggcaaattcacgctctccgtttccactttgactgccatacgtcggggcggtgctacgataaatttctctttgcccacgcctaacatcctgctaagtccctcccttagccatgactgctgtactatcatatactgattacggtgaacattaatcctgtaagcataacgggtgaacagtgaaaatagggctatcttatagttgaaataaaaatcacgccacgtccgcttataaaaaggaaaagaagtctggcaatagaccgcctgtcgtttggctatcacacgaggggtggtgtcatgcagtgaaagccataaatcaatcccgggtaatcgttgagaaatgcggtgcatggttatatattcgcaccataaccggcgagtccaacttttgatgacatccggcaattcaatatactcaatgccgttgaactccgcgagccttctgtcgtgtacaatggctatcacacgtacatgcccctcacgtacacaggtagaaagatattgcaggcactctttcagaatagtcaaagtacctccctgacgcaatccgacagcagacacgactatgagttttgcattgtttcccatattagaataaaaaagaaaatataaaagactttcgttgtaacggactgtacatttaccggaagttttcaaataaatccgtccatcgttgcatgacagccttttccgaaaagcgggatgcgtcggcaaaagcattacgtcccatctgtttgcgcaaggtttcatcacgcattaatacaagcagtttctctgccaaagccggtatgtcatttgccggcaccaaataaccggttactccgtcggcaacaatatcggaagggccgcacttgcaatcaaagctgaccgtaggtacacctgcggtctgcgcttcgagcaataccataccaaagccctcgtaacgggacgacagaactagcacggaagcttcccgataaacgctttgaatatcgctggtggcaggacatagctcgacacgatcttccaacgataaatctaaaatttgctgttgcaggctttctttcatttccccttcacccacaatatgcagctgccaatcatcgattgagtcgcacacccgtctccatgctcgcaacagcatatcgaaccctttctgataggtgtaacggcctactgccaccaccgttttactctccaaagcggcgggaacatcacacgcaaatgtctgtgcattaggaataacctctatatttgcatgcccttcccaataatccttatcctcatgcgtgagaaccacaaatttatcaaaacaagccacttgcctctgctcattccggtttctccatttatcagccagcctccaaagtcctttgcggtcgtactgcaaacgcttgaagcgggagaaatgcacctcaagcactttcttgcttccatcctggatggaaggcaaaaaagcgacatcgttacaaaacatggaaacagtaatatccggtttgatgagattcaatacctttgtcagacgacgtttatgtttgagttgcttgaacggataatgaaccaacttattgaaaaaggattttccgttgttggtctcatagttcacatccagatccacacactcaatccgcccatccaaagcaaaaaaaggtctgcgtcccctctggtctgtggtcacaatggttacttcataaccatgtgctgccagataattggctttgttactcaatacacgctccataccaccggaattgcaggtgccggatatgcaatatacgattctcattatgcaacctgtctgactgttgaacattcatcttcttctgccatagaatcatctgccaccaagaacagagcataaataaagaagagatcggtagccacttttatccacaatacataattcatcaccagcaggagtatgaataacaccttatgtgccggatattttttacgacattcgcgtgtgcacaacacaaagaaataggcaaaagccaataatcccgttatgccaaaataaaatataaaacgaagataccccacgtccgtgcccatgtggtatgccccatacaaatgcccggtataataaggatttgtaaaatgtggagaaaggaaataaccgtcaccgataatccatgtccttaactcttgcggaacctgttgccacatcaacagtaagtcatttgttgaaccggtcttgatgctacctttttccgacaagttaaagaatgcctcaaaggcaaagcgaaacatatccttgacttccacagaagaatagtataaagaagtaagaataggaattgttactgccaacacagctgcaaataacaaaaaaaccttttgagcagaaccgttaatcccttctctcagacaatataatagatacagaatggcaattatgcctcctgctaaagtagtacgggccaccatattacccgtaataaatatgaaaataaataagaatgctaacagaataatccgtccattgtttttattcgcatatctcatcaatatatgcgatagcaatatcaacgcacaagcaaaccggctacctcctgtgtccaaggaagctcctattccatacatacgatccaatctgttcaagttagccgtttcctgttccacgtatgtgtccacccatcctttaaataccggaatgaactcattcatcaaggcaaaaaaacattgaatggcgcaaacacctacaacataaaacgctatcaattctaccgtcacgttgccatgcactgacttcatacatcgagtaacgaaataggctccacctgtccatacccacatctgtatgatatagattgcataggtggtatcattggtctcgttgtataacagcgacacaatgcagatcagcgatacgacaaaagcagccagggaaaccgtcaccatgaaatggctggacacttgttgcctgttacggatctgattcagaaaaaacaataccaacccgcacaccgccaaataaatcttagtattaccaaccggtaagaaagtaaatgaaaacgggaacatatacaaggaacaggcaatccccgttaatataatagctataaaatgaatcatttgtatagtattccgtaaacaaatttaaataccagctggtaataaagttccaccagccaaaactgccttttcgcagccatcagttgcaccaatcgcatacgcagggtctgccttttgttcgccataatgtatttgttggcttcggggaaacaggccgtccatgtccgataagagtttttatcgttactgatgagtagcggcatcttggcattgagcttgaagaagttgatttccttttcatacttcccgataaaatgggtgaccagatagtccgtcgcagcctgcaagttacgcatttgacgtttcatctgttgttcaggactaagcctggtgaggctattctcgttttgttttacataatgatagaatgcgtcttttacgaatccaatactcttcgcatgtgagaataatttaataagtaccagcatatcttcccctacattttccccttccatgaaatgaatatcattcattaaatacaagtcacgttttatcatatagagccacaagttccaacgcatcgttcctgataacattcctctcagagctgtttctgcatcagcataacaaggcatgggcattcgccgttcattttgcctaaaacagagataccacccgcaagctataatatccttctgcccctgttccgatcgcaccaccatcttctctatcgcatccggctctatccaatcgtccgcatccacccaatacacatactctcccgttgcggcagccaaccctgtttcccgtgcagcagctacaccacgattagactcgtgatgaagtattctgatttgttgctgaagttgcggatagcgttcggccacctgcaagagcacctctacactcctgtccgagctacaatcatctacgaatatatattctatctccgtataactttgtcggaaaagcgaatcggcacatcgtgcaatgaagtcctctaccttgtaaagtggtgtgatgatactaacaaccattaataataaagctttatcattagatacaggacaccggacaaccgcaatttcaaaagcaagtacactaacaatttgtctttagatgtccggcggtaagttttataataatcgagtatcaacggatagtaaaaaaaattcttcatccgcgctaaatcccttagtagataattacgatttacataaagtttgaacaaccatatataatagttcaggacatgacaacgggcatgctctgtatccatgccgaagttccgtttcaatccgtccaatacacccaaaatccgttcaatggtctgcaaagaaacagtttcatccaacgcatacttgaaatccgctcccggctcagtataatagtcgtatccctgtccctgtttgaaagccaatgaagaacaatgagccaaataactccacacgaataccacatcttcgcccaccttcatctccgtattgaaaatcagccttaacgaccgtaccagagaagtgcggaacagcttcccccacggacacaaaaacgtcatatcagtaagccgggcttccaatgctctcttaatagcttccggagaatgagctgtgtcagtcggataatttgcacttggtatttcattggcccctaccgtatgataaccacctatcaccaaatccgcaacttcaccgtcaagtagggatcgcaggaaatccggttccagataatcgtcggaatccacgaaagtaatccattccccctctactaatttcaatgcatcgttacgggcagcacttactccaccattggttttatgaaccacccggatacgactatcctccgctgcgagttgatctgctatcttacccgtatcatccttgctgccgtcatccacaactatcacctccaaagccggatatgtctggcccgttatgcttcgtacacaacgctccaataaccgagcagcattgtaggccggaacaataaccgaaactttaccctgcaacatttctttcatctctatttcacactgtatattatctgagaaagatactccttgttccgctcctccgaaaattgtctgccttccggcacttcattcacgtatttatgcgggacaggtacttttttgggcgctctcatcagaaaccattcatactcgatgtcaatgtgcccaatatcaatagcctggtatcccacttcagctaaatcatatgccagaaccgtagcggtatgtcccaaagcaatcaaaacgagttttgccttattcacggtacaagctgccttcattatttcatcatacttggcaaaagcatccaatgccgggcaaagtatgcgttctatactctgagcattatcgaacaaatcattgccgacacctaaccggctctgttcaccttctatgatgcagagatcgcgtccctgccatatttggcggcaatgctgtatatagctccccttcttttttttattacgagcgtctatatagaaccgggtaaaataggagtctccatagagtcgtgtaggatgaatggaagcaaatatcatttcccggttatttacaaagctccgctcgatgaaccgtctggctgtaaaagagaggcttcgatggcttttccatacatagggaatgcacactatcaaattcagctcttcgtccgatccgtttcccaaaatttgctttaaacgccatgctaatttttcatcgtatgtttggaaatcacttttacgactttcatcaaacccctctttcagacaagtgatcatgtcaatttctccgtcaccatatcggcaaacggaacattcgtgtttaacgatatagtcgatggtttcctcagccataaggatattgaaagcattccttttccgcttcaacaaattatattgaagccaatacaccgcttttcgcaaaggcactttgatacccagccaaaatgaattcaatacggaagtcatagtattgtttaataataatcctttcttacaaaaaaacgttcgttgatattcctgagcagaagcacgaaccatctagctgtcccgcatatgtttctatactccttattccgatagactttcatgaaatccttaaaattagtacggcaagtagtccagtttatccattctagctgcttatatttcaatcccattagaatattttgcataaaagctttttcttgctcgtttttacattctattcttttcaaataggtcttcatccaatcagcatataagaaacaagctttcagttttagaagcattctgtcagaagtctctttgtttgaagaaatattgatgccagagaaacgaaacataaacaaaggttgcatactgcaagctacaccgtttcccgataacttactccaagttgcatcatcggtaaagaaagccaaaggaaaagcgacaaagccccccgttgagatcatagcttttcgtctaaacataaattcttgtacagtttggagccgatggttgcacaaacgctgggaaataaaatccaaacagctttcaaattctgctgaaggtgcagacgtaccgattaccccccccaaaaaaaatgttaattttattaacacgacaatgaaataagtcgtattgggaatatttctcggtaagtttcaccatttcttccaaataagttggcgcatacatgtcatcatccgaagccattaccacccattcgcccgatgttttggggagacaataatcattccattgctttaccaaatctttaccgccgacattatactcgttctcataatatgccagacgttcatcctggaatttagcaaccacttccttcacattttcgggagatgcatcattgactatgatcaattcaaaatctctataagtctgtgaaagaatcgaatgaacagcctctttcagacaagtagctttgtaagccggtaatacaactgatacgaatggcataattattaaaatgattatttattcaatgatctaaaaaagatgtagccgatgtatttcagggggagtaggtacaagaacaacttccatcctctcgacagcccgatgcttttagcctctttgcgtacctcctgcaaaaaagggtggcgtaaattcactcgcccctgctgagccatgaatgccgacttcaaagcccttactttttgaaaggtaaacgcttcttttacctcttcgtagtatccgccagtcttcaatgctgaaaaaaggcaatcacagaatcggctctcatattccaagttggtgcggaaggtgtgcgataccgactctccatatacatgatacccatataccatgtcccggataacggcaattttctttgccttgttgcccaactgtacgttcatgatgaaatcttccgccataatcagttcacggggaatacagattgtcccgttatcaaacaagattctgcgaaatatccgaccggtgatgtattgggatattttgtttctaatcaacccgtccaaaaattccactgcttgcaactgcctgtcgtcctggttcatccattcttctgtcacatcattgccggaaacaatccgcttgttgcctatcacaatgtcacaatcagcacttttgcccagcatcacctgaagtgcatcgtcggcaagcgtgtcgtcggcatcaaggaagcaaatccattctccggtagattgctccacgccataaccacgggcagcggtcacgccttgattaacagtatgatatacctttatacgggaatcctccgacgcatacttgtcacaaatggctccactgccgtccttacttccgtcatccaccaatatcaattcccaatcctgataagattgagacagaacactatcaacggacaatttcagatacttctcagtattataaaccggaataacgattgatatttttctcattaccgacatttcttcattctacatcatactcgtcctatcaatatgttcaatacagagaccatatatttacggagcaaaaaataagtaccaatcaacagtataattgtgaaaagggctgcacaaatataacaattagccatccccatacccgtatctggagtaatgataaagaatagtatcttcagcattcttgacaagaccaaacagtgagccatataaataaaaacacctgatgcgcctatatttttaaatgtcagccattgtggaacacaatgtaacatccaacttgtaacattaaaagcaaatgcaataaatgcaaacatattcaccgttcttattaagacagccacattactataataaccttgtacaaacaaataacaaagtgaacaaagaggataaagtatgatagagattttaaagaactttttgaatacatcaaccaaattcatcctctgtagacctataagggctccatatgaaaagaagaggaaaacggatgccaactgatagagatgccaatcaatatgataaaaaccaaacaataagtataatatccccagaacgataatcaaatatgcttttattttttttaacaagaaatataatacaggagtgcagacaaccactaccatcaaatcacggacataccacaatgctgtattaattggataatattgtgtttgcaccagttgggcataatctgttatagcagacgggacactaagtttgccattatacatataaaaacaagacaggatattctgaaatgaaaagtctatgcaagtacctgatactgaaataaaagtgtcaaagcaggacaattgtttaatggctacaagtataatacctataccattccataacaggtaaggtatcaaaagcgtatgtatcctctttttgattttgtcaaaataaacctttttgttccattccttaacaagaaaaaaaagataaccggatatgaaggaataaacaggaacgattgtatgtgccaagaatgcatccaacacacggcttaccaatcctattaagggatattctatatcggaaaatgccgatatactgcttagagcaaatgcatgaaacaaaacaaccaatagggcaaggacaaaacgtacatagtccatacataagaattggaaatccttatgcgctattgaattataatcaggccacctttgattcattgcatacttttaacgatttttgctttagcttcaagtaacagatatgccacttgaaaagaaggcacataagccaatatatatttcgagaattgcgacaatgatttcacgcccaatactcgttttccaacctccttacgatagttttccaattttttgcatctatcgtcatgacgcattacaaaagaatgaaaaagtgattgagtcaaatcattttcataattctgaagtaacaaattgtcttctcctgaaaatattcttttcagaaccacatatattttgagaaacatattaaacaaatctatattgccatacttggttgaaaaatcaggcatatcataatggtaggcaccttcctccatacattgtattgtagaaatgtattctgcgtattgaagcataaacaattcgtcctcacgcaatacgagttcggtatcaaaacgcaagccacattgttctataatttcacgtttatacattttagtacacataaaacccaatatgttctcctcctgcaatttcaatataccagtttttacattgccatgaaaatttatgccggttcggctctgccacaaattcccatgaggaataaatccctgtacaattaattccgtgccattatcaatttgatttttaaatagttccaaccagttgctatcaacccaatcatcggaatcacaaaatacgacccattcaccttttgtatattccaatcccacgtttcttgcagaactcgctcccccgttcacttgatgaaatacacgtatccgcgaatcctgtatcgcatattcatcgcacaatttgctcgagtaatcctcgctaccatcgtcaatcaacagcaactcccaattgacaactgtttgtgcttgaatggaacgtacacatctttcaagggtccgctccgcattataaaccggtactatgatagtaaattgtggcattaaattcatattattcctttaatattctatcattatcaaattcattgacgatggaatccaaatattttggagaagcatcattaacaatgacaagctcaagattggtataagtttgccacaatatacttaatattacctcctttaaataagtagccttatatgctgggagtacaaaaggaaaaagcattttgttaaatttatacagatttctataatcttaattctcatttaacgcttgaaacaggaactcaagactcttaacttttaaattctcatattttcgttctacttctgtataatcttgttcaataagcaaaatttcttctttatcaacaaattcttcatacgagaacactaatctatcatttagcccgaaagtatcaagcaaggaaaaaaaacgttcatttcctctgcccgaattagatattaccacaaacggtttacgaaaaataatagaaaacacacaaccatgaaatgaatctgtcactacaaaatccgcattagcaaaagcggaaagccaagaagaaacagaagaaaatcgaggcacttcatctttgtatcgagatggaaagagtaataattcggtctgagacaattgcaattgctctcgtgcaacagcaatgatatttcttttctcttcattaccatcaagcaaataactcaccaaacccgatgaatccatatcggatttctgcatgaaagaacgataaaaatcaacaggaagcaacaaagtcggatctaatacctgacaagccgacagatgaaaggtctctttcattatttttactccggactgttcacgtaccgatatggcatcaaaccgcttggctagttctacacattgattcaatgaagctacagagataggattctgttccactccaaatgaagccccataggctattcttttggctctgcatttctgtgaaagaaaatccaaaaagaaattagtgatacaaggagaaaaagactcgcgccatacttgatcgcttcccactaaaaaagcatcaaaatgatgcagtcgtacatagatcttcaatatccaagtactctgtagccggacggaacatttcaagttcttccggataaacgcttgtatttcgttatcgtcataaacctgtgtcttatctgttgcatagaagtgtaaaaagggattggcaataatagcacggttgtcccttaatatatacttacgaacaatacacttcaacacgctcaatatacgcatcaggcaaagccggaatggcggatagtcatattcacgactgagaataactgtctcatgccccatcgaccgcaacacggtttgcagagccaaagcctgtaatatgccaccatagttgttactcagcggttgagtcaatattcctattttcatattagcctgaaaagttttctcaacgcacgaatgggaaacgttgtgcttgttgccaacattaaagccttatggaagccggctttatcgaacatgaaccaaaaaaatttcctgttattcggcatgctcaccgaataagctgtgctcagattatacggcaagatttccgaaatgggaaattccgccaacaaacagcctttctttcgtaactcatccctcaccttcggattgtttataatcaacaggctgcagccacggtcgtcatccaattcgggagcaatcttctcaatgccccagaagtcacccagcgtaatatcactaccggacttccctgatttcgcgggacagcggtaacaagcggggcgcaaggagagattcgccaaaaatgccttcatataggcattgtcgtagaatatacgtgagagcgaaactgtatttttctctccggcggttgtcaccttggagaggatgagagcgaaactgtattttttccagcctaagcatttgtttctgaacaagataccctctataaggggcatctcgtccaagaacaagtggtttaaggtgggacgaaactgaattttttcgtcctgacggacgagtgtttcttctatgtatttcctccataccaatggactcggcacaccgtgacaaacgaaatcgacagccagcaagttgtcgtactctttatgaagatatctcttcagccccatgatttggcagggagtacccgagaaaagcaccttacgaccctctttcagaaactgttccgcctgcttgaaagtttcgcctgtccggctttgtacgtatttgcttccccgaaatgcttccagtccctctttagtctcagtataatcgtggatgacattccaatccttgtcaaaccgtgcgccaaacactacaccattctccgcgagaaccgattctgccagaagagtgaaaatgccaccggaggaactggcaagacgggcttccttatccggattgacggccgcataaacagtgacgcccccgcttcccttggcttcaaccaattcggggcaggctttctcacatttgccacaatcaatgcaacgtgccgtatctacttgcggatacataaagccttccttatcctttacaagctcaatgcactgcaggggacaacttgacacacaagcctcgcaaccacagcaacgcgatttatcttccacttttatcatttcagcagtttagtctttactccgtggagcgtctgtacgatgaacgcgcgttcggacgagccgcaccctataaaataggaagagactccgacgcaacacacacttgccacacacacgactataaaacgaatccaaccgtcttccatttgccgactgagcaatatgggcaaacaggaagcggtcacagccacagtgaacgtgttaagacatacattccgtatatatcgcctgacggaaagacgaaccatgcggcgcaaaaaaagcaaacggagtatcaggcagcaaacggaaacgaacaatgccaccaccaatgtggattccggagggaaaccggccttcaagcaacaataagaaagcggaaagttcatcatcagcattccgccgaccgcaatctggtaattgcggatattaccgttcgcgttctgcagtgtgatcaaggtgttcgacagtatatcactaagtgacagcagcaaaaccagccggacgaaatttacggtatggtcagggtattgcttcagccaaagattcagtataaaatcggtttccaacaagactggcaaggccaaaataaacatgatatagaacgagaagcgggaaccgcgctctaccaatgacattgtatactcccgattgtcggaagcgtatgatttcgtgatttgaggattcagggcaatcatgaaattgccggaaaacgagcagatcgcagcatttacctggtcggctatgcctcgggcggcattcagtaccggaccgacaaagatattgagcaacacattgacaccctgccctttcaacaatccggcggtacaaccaataaagttccataccgcgaacgaactcatctctttccaacatggacggtcgaaactgaaacgccaccggcattcctcaaaatgtctgccacaataatacaaataaaagcactgcaaagagatactgacaagaaccaatagcaacgaatagattatcagacggtcaaaatgccacgaaggacaggctataaacaataccaccagcaaacgcagcatcacatccatgattcccgctttggcaaaagtacccatatgctcatgcgatacgatcgaggcgttgaacggcgtactgcacaatcccagtgcaaatgaacagacggaggcctgaaatacccaatttgctgcatgaagccgatcggccggtatggtcatttgggtattcaagaaccacaaaccgacggtttccgccgcaaggactactgccagtgccaatatgatgtgaatggacaaggaagtgaagaacatcaatttaagccgttccacatttttcctgcctaactcaaaagtgagaaaacggcttactgccgatgacaaggaggaggaaaccaatgaaaacatggccacaaacccgcctacaacattatatatgccatagtcttccactcccaatgcgttcaataccactcgcgatgtataaagcgataccaacatgctgaatagcatacgcacgtagagcatcagcgtgttcttggctatgcgcctcgtgttttccgattgtgtggtcattagcatctaaatgacagcagaaagaacttatctgacgacgaatctacaatctgtaaattattacctaaatatccgtttccaaatggaaatctttttctgtttctcaaagccatgaatttcattcaaatagcgttcataactccaccgattatgtatcatctcatagatagctccccagtcgggcagtttccccacattcaagtcatcaatgtacaagtcggccacgactttcctgcaagggctggtcatatcgtttctcacttcttcttccggatgatttgcattgacagcataaaactccaatccgcgcttgcggcagaagtccaccgcctcgtcaagcagtttcccctcacgcaccgtccataaaacaagcaaatgccgttcggtctgcaactgtttcagggtggcaatggcaaaaggaatctctttccctatccgcggatatctgtgttccacaatcgttccgtcaaaatctatagctatcctcattagttgaattggtcatcattgttaaaatataagcaagaaacaacattggtgaacatccttttttattttccaaacaagtcattctgaaatttttttgtatccaatatagggcctataaggaaaggaattcctttatgttttataatattcttactattaatatcgatcgcccaacctagtgtctatgtttttttccagaaatgccatcttttacaattctgttgtgcacataaacaatagctatttgctttatttttatcgtaaaataaaaacaaaagtattccggttaccgacatttagtccatttcatacgcgctgtgtatttcctaaaaccaagaattgctttatcgaatttatcagtaatatcatagatttcattatgcgttaaactgtctgctttcactactcctacaattaaaggttgtcctaatataaatttgtaaagcacggcatctgtcatagaatacaaagcctttaaatctttcttaaaaccttctccattaaaaatcgttttaaaatcagcacaatcagaatcaattggggaaccaaaaatttgagctatagcaagtatgcttttggctacatctatgccgtcaatcactttcccagagaaggaatcatttttaccctttactaaaccataagtataagcatttgaatctacttgaaaattttgtgaaaggagtgatccaataactttatctaaaaatgagtcatttttcatatgtttaaaagaattgtcaatagaaacatgaatacttttcgagtataccaataacagtttatactactttttgacatcaaataaaaaaaatgtagtacttaaaactttacttataattaccatctacaattctatcggcagaaacggatatcgaatagccagcgactcccgtccggtttctacaatttccttcaaatccacagatatatccatgcagtttataacagacaccagaatttgatccgctttttcacatattatcatcatgtctttcatgtctccgatatgggaatcgtaatatatactccggaaatagcttcctgtttcttcaagcaggaagaacgctatttccaccgcttcatcaaagttcttttttaccatatcggatttcatccttgtaacccacggcgtgagattttccgccatgcccattatatccaattgattttggggtgtaaaaaaacagccgtctatttccttttgaagcggtgtgaatgtgacatacgatgattgcctgattttttccagctgcttcctccgcagacggacatattcgtccagattctcgaaactctccttatatatgcctccaatggccactgtcattcctccaatggaagtgaccaggcacttgtcacgagagattctgatgcgatatccttcaaggccggaaaggataccggaagtaatccggactaaaggattccccacagaataataatcaaaggagtggggcatgaaacggatacgggtgggaataacttccgacacccgcatgaaaggttgcatcacactgtcaggtatggcggctatttctccggtactgcaatccttcactaaatataaattgaaaaagttctcttttaagaatttttgaatcctgttagcgtcaccttggataaagacaaggccggaaatggttgcctgttcctctttctttatccgcttgttcccacgtttatagacgatactcttatgaacaaagatacggtattgttctgtttgcaatttcttgctcacagtttctactttggcatgatggataaacaaatagcaccaggatgttatctccttgtttccggtatatttctttacctccggatcagaaatcgtctctggtccgttctccgctttgccccccatggcgttaggttgagtttctgtactatacagtgacatcgtcgctcaaactaatttatgtctttgatccgtgttgtgccatctggcagctgtcgcccgatcagttttaatttataaacaaaacttaatattccgtccataaatgtatccgtttaagtgtaaaaaatgtgcaacagaaccgtcccattcttttttgagcaagtgttctatagctccctctcttcataagagatgtataatgtgatacatgtgaataaaacaatctgataataagcactttgctttcttctaggaaactctttgctcaacagcctgtttggcagtttcaaggatcagtccatattttattcccattatttgttcatttttgtggttattctcaatattttgtgtatttttgcattcaattatacatctcttatgaagagacgacaatttttactcaacattattgtaaaggtctccgcgatgacgcatagtataccagattagaagttcctaattttgcggcatatacattaataatgatatgacaaagtctatggttttaacggagtcaactccaattcctcctgaatatccttttgttcaatattctattatatctgcaaggatttcaaaatcaacttgtttgccctgtcaatggtggcggtatccagcgaggccaggtagatcctcgttgttgtctccgaatcgtgtcccataccctcgctgatcaccgaaatcgggatgttcttgctccgggccgcgctggcccaggaatggcgcgccacgtaatgggtcagggggacggacatccccagttccttcccaagaactttcaaatgcctgttgatacggtgggaggcgttgatatattgtttcctctcatctgttcccggtctgtcgataacggaaagaaggtacggggatccggggatgttgtaacggtccacgatttcctgcatgcacggctcccattttataaggagctgctggccggttttcttccgccggtatgagaggatgccgttgttaagatccttctttttcaggaacgccatatcgaccatggacattcctcttgtataaaagctgaagagtagcatgtccctcgcataagcctttgcgggctcaaatgacaggtccaatgacttgagccgctttatcacatgcaggggtaccgcccgtttcgtagtcttctcaactccggtatagacatgtttgaaagggaaacgctggacagtaagccccttctccacggcacggttatataccgcccgcaagttacgcatgtaaaaggaaatggtattcatggaaaccccgcccgattccagccatgcctcgtatgcgaccatcagatcggaatccatatcgtcgggcaacacatctctcccttccatgaaccgtatgaagctgttgagggtggaggtgtaggtctcactggtccgtatcttgcccaggcgtttcaggccgtttatgacctcccgcatgaagacggggaaagacaggctgtaatgtccgccgttaaaggcggaaaccacgtcgtcggccgtaaaagccccccttctccgttccagggttgtgatgataccctccagcctgtcggtatcctccattatcttaccctccagcagtgacaggtgttgccgtcttccctcatcggacggagcggcgacgatacgggcccgccttttgtcccactcggcggggaacagcctgtatgaggtgctaatctgtcttgccacacgtacatgaatcacttggtaataaactgtaccctctttaccatccaccgaggatggtctgaacttaatttttactgtagccataaattcttcaattttaaattttatagggtacaaaattaccagatacaacaaattgttgatttatgcaaaatattgtattctagtgaataaaaatcttcttattgactataaggaaggggatcggaaaacactacatccttttctgaacgtcaggagtaggattatgttgtcatggaatggaatcgatgatgacaaataataaaaaaacgaatgtacgacatacaaatatcctcagtgccgtacattcgtttttatatttttgtcttgaaaaaaggttctttgagttgatgcagaataaaacagaatattgtaattcgatcgtttctaaagtgttacctatgatctataaagtgagtgataactattttattttcagttagacaaagaattgattgtgtttacttgtgtaagtaatatttaaaaatacagtaaaaaacagaatggtgataattaaacgtaaatcgtttataattaagtattttacaaaaattgcagaatagcctgacctgcctttatcctcaataataacggggattatgaatgaaactgacgaagtatgacccgcatagtaaccggtaactctgataaggtgtccatttagggatattcagtaaatgttcctctttcttctaaattaagagaaaagttttactttacgtgagcttttctcttgattttttcgttcaactctcccagtcttctatcttttttgtagaatattatttacatattcttattttttccttcccacccatgcattatgtacatgtcttttttaggggaagttaaaacctctcctgtttttcctgttattttagttagattatgctgcctttctttttttcttttcgaccttttctatcatacataccgcattggctgtatgtatcccaaagaaaatccaaagtacttccgttttcctgtttctagcttttatcctggccagtgagtaatgttgtttctgcgttccaaaacttccttccaggcgggtagctctttcacggctgagttccgaccgtaagattttccgaagcggctcatctttggcagctctgcccttacgcttaaaggaagtacttatatgatattttgtacaaaatttccggttggcattattggcatagattgaatccgccgcaagcgccttaaccctaaccccggtcagttgttgttgcagatgaatacagtctttcaaacgtactccttcgttaaaagccttaaaggagatatgttctataaaggagattccgtctatctgtatattgttgactttggctccgaattcaacggatttggtttccttgcctctgataatggggcgaaggtaatgccggtcgatactcacgatacggtcggacactttttggcctgcaaataaattcttcccttgctcaagaaccgtctgtatgaccgagaatcgtctttggtaatcagaggatagtgtaagcctgttcccgtaggatgaatgaatccgctccagctggtcaagcaacttttccaacaactgaagtagcccgcgtgtaatcatacgggtctgtgatttcctgcgtttacgcagtttactgtaaacaaggtaggcacggcttacatcaagatacttgttacggggacgttgtatgtgcaatctccggcaatgtttgcacagatgacgatgaagccatacgataccttcccataagagtttggtatcagtagggaaacgcagacggctttcataacaggtggcatccgtcatacagacatgaaggttctcaagataaggtttccaatgcccggcaagaataagctggagggactcaacatcaaggcgattcgtcaggaactggcggatcgcactgacgattttaggattggtcagcggatgaagcggatcaatctgaacaccacaaaacaactggtaatgaatattaccgtttaaatgttcaatcagttgtgcatcggaaaagttggtataggacttcaggaccatcaaggctattttaccttcgggagaaaaataacttttacgacccaaaggagaagacttcaaatgcatttgtcggaccagttccgaaaaagggaagagagcatggagtcgacctaattcactcgttgcaaaactttgacgatattttttagcatatcgaactcggtaaaacctaaacaaggttcgattccggagattttttgtatctttaccatgtgtttttagtttagattacccccgttttggccgtcaaaccgtttttgggggcaatgcttaaagatacaaaaaagcaactaactcgcaataaattagttgccttaatttttcttattttgggaatatccccatttaaattagattccaataagatggtcttaacctaaaatgttgacttatcattcaattcaatggtgttaccgttaactactccttcaactattatgaatgaccattcatctattttattgtcaaagtcgtaaatatctgtcgaattgggatattttatgaaatttcctgatgagattatatctactcggtctgtctttatcgtcacacaggagttttcatcagtaagtttttgcccatacaaaatgatttcatctccggctttgacatcagtaatagtagtcgcacacattgcttcaagactgaacttatcagaaataatcatactgtttccacttactatgttgacgacagcgtctttcactataataaatgaatgatcgtcagtagagaatatatctttcactgaaatttcagagattcctcgataacagtcgccttcttgagagacgataacataggcatagctggagagttttgactcatgaaagactattttgtctgtgcgtggactgtcaacttctccatcactataattatccttaacgcaaacggtcacgtctgtgagtccgacaccatttgaaggagtaacagtaatctagtcaggcgtatcgactctccattcagcatcagcatatatggtgattatcaggctctcagcatcagttgactcgaaagaaagattttctgtacttgagagtacagcttttgccattatcggctcattatcgttgatgcaagcagaaaaaaccgcaagcatcaacgtaaaaaataggatatttattgactttttcattatctcagtttgattataatgatattcttaaaaatgaatcagctcctgtccatgcattatctacagagaacccgcggtccttgtcagacaaaattattgagctaaattcagggagtacaataggattttttccatccggatgaatgataaaacgcaaagaagtaggattcttgagttggatattatgaccatttacgggagagatggaaacacaactcataaaaagttgacgtaaaaggtattcctgtcccattaatgtccctcctgcaccatatccgatggtacgtctattttcaagagcatctctcattgcatcaagtgaacggtccttagctaagattatcgtcatgtcccgacgtagtcctctaccaatatattcctcaaacgatgtatcgtgaaggtcggtcgtcgatgctacgaataagttgtcttcttttgctcggtctatagttccgggacaaaatgctgtgccattgttggcttctattccgtcaataagcccttcgccgtatgcttttagttcaaaatctgggtgttgaatcgattcacggcgccaaccgggatgattatgcatcaccaaagctccctgagctttggcgttgcgaattgcggtgagaggatccgggtcatatatgccattgttatctgttgtgaacagagcgttatagtgcccgataccttttggctcacgtgtgatttctataccgggaataataagcagaccatagctgacggcagctttcttggtaagttcaacagatttgttcagatcttgctttggtttaacattagtttttttattcacattatgagcctcgataccatcagggagtgtagctcctagataacctatcatatcagtatcggcgggatgatattcaatgtgatcagtcactgaaatagcatcaagaccatcgagccaagcttctcggacacgagcagacggcgacagatgtccgtcagaaaagtatgtatgaagatgaagatccgccttcagtggaatatatccttcgatggaatcgggaagtatgaactcgacgcgagtggaggctcctgtacgatttgcctgatgtaacatatcactatttgtagcctcggtgtaatatgtttgccctgatgcttttacttgaccaacaagaaagatgagggtaataattataagttgtttcattgttttatatgaagaatttaagattatcaaaaacctaaaccatcatcccatccaggattctgtgtcaagctattattcagcgagcgttcatggataggaattgggtaaagataatctctttgttcattgaagttaactcttggaacactcctgtggtaatatatgtagccatgatcattatttgacaacaatatatcctttccgagagcatatacctgaactccaactccggcattgggtttaggagtaccctgattataaaaaatcacgtcaactttcccatcaccggataagtcatattctccagctcctgcaatatacattcccataaatggagaaaatgatttatcatcagagtcatttattgcatatcctgctttccatcgcataaggtcagaccaacggaagccttcctgtacgagttcaacggtacgctcacgacgtatttcaagtatgacacctttgttggcaccattcacatttgggaaaccggttttagggtcgcaaagatatggatcagggatagcgttcgacatccccatgtcaatcccgagcataccgacacgaccacgtagcagatttacggagcggtcaagatccgactgcgtcaatgtccccagttcggcctttgcctctgcataattcagaaggacttcagcatatctgatgacaggtaaatcatttactgaatagcttgccctgtcggtattgcctccggcagccgtgggatcttgtacgaatttgataggttgatatcccgtgattgcaacgccgagatccggagcgagaatctctttctttccgattcgtgtataaccgggagtacgtatagactgagccaaacgggggtcacggtttacagtctcttcattaaatcccatcgtctcccaaccgggacggtcagtaaatcgggttccatctgaattaagatacatacaaaccatcttgcgggtatagccgggacgtccttgattactcaacaacatgtgtgcgtttgatccatgtgaattgttaaagattgcatagcggtagctaatggccaggatatattcgttcggattggcatcatcctctgcaaagagaatattgtagtcggtagaaggagagccggtagaataaagcgaatattcaccactgtcaatcagcttgcctgctgcatcagccgattgggccaagtaatagtctgcgtcatgtccttcaatccgtaagttgtgatacttacgataagtaccttcaaacagacatactctgcttttgaaagcgagagcagcacctttggttactttatagggggcttcagcctcattgttgcgggagggaagatgttcgattgcgaaatcgagatcctccagcattttctgcatcactaactcgcgggaatcgcgaggcttgtagagttcaggatcagtatcgcttagttcggtatcgtaccaaggcacatcgccaaatcgttcgattttgtcagcatagaagtacgcacggaagaatctggcgacagccgaatatttttcggcggcatcggaatcttcgcatttgtcaatgttgccaagcaaagtgttgatacgtctgaggtctgtccatgaccatccaccgcctgaagcggggacggtacgataggagccccccatcagctcattggagagcgactgacatacataaatgtcgctctgatccttgtattgaactttgggaaggatgttattatataaaggattcgtgaagagctccaggtctgaagctgtacggaaatattcttccgatgacattctgtccttcggcagaaggtcaagatcatcgttgcacccacacatcagagtgacagctacggtgaaaaccagatattttattattttcatattctctgttaattataatgttatatcaattccgaacatataggtttttgcccaaggataatacatcgcattaagttgattgctgctgcgactgaaggcggcttccggatcaatatatttggaatgtttctttatgggagaccagtaacacagattctcggctgtgaaatatacgcgcaattgttggattgatacttttgaaagtatttttccggggatagaatatcctattgtcagatttttgaaacgcatatagcggatattctgaagatacctgtcatttacaaagcttaactgaccattttttgctgactgtccgagagggcgggggaaatatgcacccgggttgtccttcgaccaacattggtcgataaagttacgtggtatatatcctgccacaggatccgaaaatgaaccccaaaattggtaattatagccatttggataccaatagtggttgccggttccttggaagaaggcataaatatcaaatcccatatagtttagggagccagagaatccatactggagggtaggaagttcgtttccgatgattttcatatcacccggattcaaagcagagtcctcacctacagatatcttaccatccccatcaagatcagcaaatttaagatcacctgccctccatgttccttgaggaagattcttggcaacaactccaagatctacctgggatgaatattgggctgcctcttcatcagaagcaaacagaccatctacatgataaccccatatttcaccaagtttcatgcccggatagtagctctttgcaaatactttctcaggattatcataacgtgttatccgtgcatcataattactgagattggcagaaacagaataagaaaggttgtgaccgaatatcttcaaattatcatgccatgtggcagaaagttcatatccttttgtccgcaagtccgccgtgttcatctgcggaggagtggcaccatatactccgggaagctcaataccatcggtaagcatattaacggtatttcgcacataaatgtctccggtaaaattcaaacgattgttgaacatcgctagatctgcaccaatattccactgacgtgccgtttcccaagtaaggttttgtgctatgggtgctccgatagacgaatatttcgcctttgtatcagaaccaaagttgaatgtgtcaaagtcactgagagtaatcatacgaaggaacgtataaaaagaagatacgttctggtttcccagacttccgtatgaaaccctgaatttcagattgctaagtgacgggcgtgcccattccatgaatttttcttcggatattctccagcctacggaaccggaagggaagcatccccaacggttattggaagcaaaacgggaagtaccatcataacgtccgctaatctcagcaaaataacgtccgtcataatcatagttgacacgtccgaaccatcctgcaagcttgtattcgttctgaccacctcccattgaaaacatggttgttgcgagattcaagtcatcgaggtcatctgatgataactcataacctactgcactaagattttttttatgccaatgttcataattgaaaccaaatgttgcggctaaattatgtttatcattccagctttgattataatttgcataggcatttacagatatatagttcgatgtataaacctgttcagtaagtttgttttggccggccccaataccgtaaaagtccatttcggaatcaggatacatcctgaaattcaaatgatttgaacgccaataattacggtcctgatcaaatttgtatgaaaaatcgcctgtaatacttaattgcttgataggggttactataaaacgggaagtatttataaaactcatattgcgttcaagattacgatgtgagccctctccaatcataatatgacggccatttgccatttttgtactctgataaggtactgagtatatccatgttccatccggattcttgttgggataacatgcaaatgcaccatttgcagaatatccgaatgtgtcttctatactgccgtttccctgagatttataggaagtagagtaaagtgatgtgttattggaaaatcgcgcccattttgtaacaggaaactctattttagaccgaagattatatttgttataggtatcaggattaactttcaagatgcctttacggtattcatacgctccggatacgaagtaatttacatcgccaatgccgcctgacagtgatatattatgctgcattttaggccggttatcactgaaattcatgtgataatggtcataatttccataatatacccactgtttttttccattacgtacatcttcaactatccacggacgatccgggtgttctgtacggtcgttgacacgtgccagtaactcagccatatccttatctgtgtagtctatgatatttttaccgtctttagctctggcaaataagttggcagtatagacagcccaataaccacggtcctcataatctgtactgttggtgtttgcctcccagccgaatctgccactgtatcgaactgtagtcctggctcttttccctgttgcatcatcgctctctccagccttagtggtgaccaaaataacaccaaatgcggcacgagctccatatatggctgcggctgaagcatctttgataactgaaatactcttgacatcgcttgggttgacttggctaagatcactttcaacaccatctaccaggacgagaggattggtggcatttactgaagtggtaccacgtacattgattgatggagatttgttcggaagaccggaacccgtcgtgatgttaagtccaggagtcgtaccttgaagcattgaggtaagtgactgggacggacgatcggaaagctccttatctgtaattaccgagaccgctcctgtgagattaacctttttttgtgtaccatagcccaccactacgacctcatcaagagcttgagcgtcttcagtcattgtaacggttattttattctcgtcaggcttcaaatctatttccaaaggttgaaagcctatataggagaaagtcagtttttttacgccggagggaagtgtgatttcaaacttgccatctatgtcagtcgttgtccctatcttgtattctcgattgaatacactgacacccactaacgggtctccgcttttttcgacaacttcaccgctaagcgttcttgtctgtgctgctgctccgattgcagttatgcaaaccacgagcagcaaaattaattttcttgttaatgcactcataagataatgattagttattgattgatttcattatttttgtgttctatacattttttcttgtatatatttccaaactcatctattggccttatgcccacatgccaaagctgttccagctgctgctgaatctgttataggagatgaagcggagaatgtggccattattccgacattaggaaatccaaacataaggagaagttcaaattcattggttctaagatattcttccgttgccataatatggccaagccccatactgtctcctataaataagaagatatatttgggagtagctttcgtttctgccagtgcgaaacaagcaatggtcaatgcaataattattcgtttaagcatacttactattttttctcgctgcaaaattccatatattttgtttcacatttctttcgggaatattaaggaattattaaattctttaatttgttattattacatatatagaaataaaaatatggattattcgtaaatttgcagtctgaaaacaggaaatggaaaatctgtaggtcgcaaaaacaaaattcctagttcgacaaaaaagaaataccacctaaacgtgacaaatcgggtcatattttaacatattcaaacgcacataatctttttctttctctttggtcataaaagtataagaaagttgaaaagaaagagattgtgtcaaatgtgaaatgaccccaaaagttttttatctaacttttgaggtgcacttcaacgttggcacacccttttttatgcgcaaagcccagacttcgcaagcccgggctttgttattatccaaagtttctatatctttagacataaagttttttgttatggcaaagttacattttcgtccttacattccccaaccagaccgttctttttccacaaagaattgatgaaaacatagcatcgaacgatccggttcgcatagttaatactgttgttgataatctcaatcttgacaatttcaagaagctttataaagcaaccggtcgttgtccttatcatcctaaaatgatgcttaaggtgattatttactcctacatgaacaatatctattcgtgccgcaaaatagagaagcttctcctatgtgacatccattatatctggctttccgctaatgaacatccggattttactaccatcaaccgttttcgaaaccgtgcaaaagaagaaataaataccgtatttacgcagttggtccttgtccttgccgacaaaggttttatcagccttgacgtagagcatatctacggtagcaagattgagttcagggccaacaaatatacttttgtctggcgcaagacagtcgaaaagaaccgtacaaagctgatggataagatccgcattctcctggagcaggcagatgaagccatagcccaagagaactcctccaaaggcacatccgtagagttcactcctgccatgctctcagatatagtgaatgaacttaaagaggcgctggaacactaggacaaggaacaaaagaaagtcatacgagaaaagaagaaacaggtccggaacttgaggagtaccgtgacaagttgatggaatacgacaaccatcttgatactcttggagaacgcaactcctattccaagaccgatcctgatgccaccttcatgcacatgaaagaagacaccatgaaaaacggacagaccaagcccggatataatctgcaaataggtaccgagaaccaattcctcatagacttccggctgtttcccaacccaaccgatacactgaccctcatacctttcttccactcctttgagcaacgctataaccacttaccaactgtcggagtggcagactccggttacggctcggaagaaggcatcaggcataggggaaggcgatgtatagaaccggaagcagtttttggacaaatgaaacacaacatggcatacagaaggtccggcatgtgggagaagaaaaggttacaatggactttgcattctttgctataacttttaatatcaaaaagatgtgtacaaaactactgaaagctggaaagacagggaacaattaactttagagaatgtaaattaaactgtgtcatcaaggaattaactttgctaacactgtttttttatgaaagcagaatttgattttgaaaatattaagaacaaagctattgaacagctgaaaaccgataagcctttgttggtaaggatggtgcttttgtccccttattagaaagtatattgaatgcagcattggaaggtgaaatggatgcgcatcttacagaagaaaaacgtcagttgggtaatcgtcgtaatagtaaaatgcagaagcaagtccagactccattaggtgagatcactgtgtctacccctcgtgaccgtaattcaggttttgagccttagtatataaagaagcgtgaggccatcttggcggagggggtagcagaccgtatcatcggactttattcccttggtaacagcacacgtgagatcagtgactggctaaaggaaaatctcggcaaccgtgtttctgacgaaacgattagttcaataaccgatcgtgttcttcctgaaataaaggtttggcgttcccgtatccttgatgatgtttattcgatagtctggataaacgctatccattataaagtcactgacgagagagggtgtaccgttacccgcgcaatctacaacgtcttaggcatagacaaggaaggccacaaggatttgcttggaatgtatatctctaaaaatgagggagcaaatttctggttaaacgtactgacggatttgcagaaccgtggagttcatgatatccttattgcgtacgttgatggcctgaaaggctggatgccacccaaagtgtttttccgaacacaatattacaactttgtatcgtctaccagatacggaactccattaaatatgtcggtagtaagcatcagaaggaattcctcaaaaacttgaaacgggtttatggtgcagtacataaataagctactgaaacagagtttttttaatctgaatgagaaatgggaagaaaaatatcctatcgtcatcaagtcatggcaggacaactgggaaaaacttactgaatacttccagttcacatcagatatacgccgtatgatttataccacaaatacaattgaaggctatcatcgtcagatacggaaagtgacaaaaaacaagggtgtgttccctaacgacaccacccttgaaaaactggtttacctcgcttatcgcaacatacgtaagaaatggactatgccactggctaactgggaagccattactcaacaactggcgataaaatttggagataagtttaaattcttgtaattttacgctcgtcgggacggttagtcccgcccattggcgccgggccgttcctagaccgatgagattgaatgagaatagagcatgacacagtttaatttacacatccttaactctaaagttccttactcattatctgaatcttacttgaagcctcaactcctatgacaccgcatatatgctgcaactttcttcctgttatacttttacttacttttgcaaatatacgaaaaagcaatataaatataaatacaaattcatcacttgatttaacgaagataacttctataatttttttccaatactgattgcaatttggaaagaggataaaggaacttgccacctataacagtataagctatccccttttcatcccgcaacttttgcaaagtcctgcttgatatatgtaacatactacatacctgctcaccagtcatataaacctcattagctacaggaacctgcaaattctgaaattcaagaatttcctttgagcattttctaagcatccccattatcataatatattcttctgattgttttgtaattaccccatccatactctatttatctttttgaattaatattctgaccaaatcactttccttgtacatatattttccaccaatgaaagaacatggaatgatcccataatccctataactttgtaaacttcgtttagagatgttcagagccagacaaacttcctgggtatccagtcatttctcccttttaactgttccaaacttctttttaacggcttcaacttgtacagataaatccttaacttgctgttttaaccgtaaatacgcacttttttctataacaattaattccataacaaatttgatttatgattttactatttacaaagcaaataaaagcacatttcaacatccgacaaaacttcctaaatcaaagtcacctgttggcgcacattgtcactcctcaaaatacaagatattaagaagtgacctgaaatatttccatactactattcctttacccatatttgctcaaaccaaaactttaataatctcaatcataaaaggaaatgcctgttacctgcatccatgcagtaacgagcattccacccctcaccagttttccgttatcctacatctttatacctttgcttttctgcacaaccgccttttcctttacgtccgctttttgccgtgtcttcggaaaatgctccttcaacagcttccctccagtttcttcgccttctcctgcagctcatcatacacatcccatctgttccggcccagcaacttgttttctatcttttcaaatttttcatggaaactgaactcgtccggatattcatctgtcagcccgtctctcggataacctttgtccatgatatatagcagtgtcatccggtcataattatgttggctccgcgtcagtcctagccccttgcctgcatcagtcaacctgtaatagttctcccatgtgggggggggtaaagtcataagtctcactgtctgttacgtttttcagtaccgacctgtcctggaatgcccgccttatcgtttccccgtctccccaccagccgaaacggttatgacaacggttcagtttcccttccatcagcgagggccatcccctcaattcatggacagccagggatttcaacacaaactccgaggcaaagaaatcattctctatgtatttatacatgtaatcactaaattgggcctctccgattatgtccctgctgaatatcagcacccctttgtccgtctcaacgcccgtataatacgtgtttccatgcttcaaatcatccagcatctccgctgtcacttcgggcgacgcagcctttatctcccgccacatctccggtgtaagccgctggatataattctcgtcccttgacagcggatccatgtcttttcacaggcaatacaccacctctgacagacgcaggtatctatgcagtttgattccatgtccgtccatcgccttttccaacctttgcagataatcatcattgttcccttcccacaaatgcggtacaatccccatatcaggcacgttatagtacatcatgcctataacaggcatttccgtttccttcagtgccttttccacatcttccagcataaactccagaaaacctttctcgcctgtacctttcatgctgacatgcactggtttgaaatgtccgtccactgtgacatacacactgccgccgttcgtattctctttttccatccgccaaaaatttaaatgttcattccttgtccttttctctttaccggaatccgcaccctcatttccacgttcgggaatcgcacgttatccggttgtaccaccagtgacgagactatctgctcctgctctccggtcagcggtataggctgccgttgcagatttctcagcttgttgaagttcctcagcgtaggtgccatgtcgcaacatgccacacaaatcccgtatctcaccatatccgaagaaaccgtctgtccgtcaccgattttagcccggtatgcagcatccagcggagccacttcataaaatctcagactcccggatttccgcttgccgtcaaaaaaacgttcggccagcctgctcagaaacgcatccagcatcctgtccccactgtctgtcttgtcaaacagcaataccttcccctcgtattccaccaccatgcaggtggggaaagccgccagcccgttgcgtatcacatccccgtccattccgaaacggtgtcccagacgcctgtaatcctcgttttccagcaaggtcatatgttctgccgatgatgacagatgcgcaatccccctttcctcgcagaatgccgcatcccggagcctcaccacccccgacggatgtatcctttcccgttccagcaccggacagagccgttccagataatccgcattgtccgtaccgagtatgggaggaatcatgcctttgtccctaaaatcgaaacggaacattcagtggtcgggaacaaatctccgtcccgccgtatgaaacctcacgttgttgccgatgtaacgagagaatccatcttccccctgcccgcgtatactcagatacacgggtttataaaaagcgtccagtgtcatgtacaggctaccgctttccaccgcctgcattttctttttttccataaattctataggattaattgtttcttctctttcttttgcggagcaatgggggcgacgtgcctcgcctgccgttgtctgtcagaaggcttttgtctcggtgtttcctgcctgcggtatgtctccggtaacttgccggtcttcacctcttccgaatgtggacgcgacatcggatgtaacgtttccatcctttcaatccagcttatccgtgcgcccagcctgaactccccatccttggcatggaactccgattgcaacaagtccgccgccatctcccttgcctctttctgcaaggccgcatagccgaagtcgtgtgccgacagaggcgcgttcatccgtgccttcatgctgtcttccagtttctccgccagttccctgaactcatactcatagctgaaaggatgtaccttgtctgccgcaacaatcccggcgtacccgttttccgaaatgtacagcaatgccgccacatcatagttccgcggcgagatgcccagcccaaactcccttgtcagccggtcaaaattatggaaatcgggccgcaggtcaaactttgcccagcacacaccaccgtccaatacactcctgtccgcaaacttgtcgggagtgaagctcaccaccgacctgcacaattgtgcgtccgtactccgcaaatccgctttggacaacttttcgatacagttgtctgccagttccgctacccgtttggtaggcaggtctatctcgtatatccgcagagtttcagatactttggccacgttgaagaagccgtcggccagatgttgcagataactgttacgtgccttcattcctttcggagtgtccgagaacagcatcaccccctcttcggtggccacggcatacacccgtttttctgttccggcagcttccgttgctgtcactttctgccggtccgttctccggacgatacggttccaaatatcattcaggattgacataaccttgtttttttagatgtgaataaccgacggcaaaaaaagccattcgcctgccaatccgcaataccgaacacatacaagtcgtccgttggcggctgttggcgtgcaacctttacgccagccgtgcgtcaagcatccggttgtagctcctgcgcagggagtcgatgaacggagtggtgtccgtacaacggtcaaacacctttccacgcttggtatatagggcattgattttcaagtgaaaaacttcctcgaacacccgtatcacatccaccactttcagctccctaccttccgctgttcctatcactccggcagccatcaacgccgccaccagttctatcaagtcgctgtccgtgccgttccacgtcagcgttacagaacccttcttcccgttcctgcataccgcctcttccttcaatcccattgcctccgttccaccatgccggagtacctctttcatcatctgttcctccgcatccagcaacgcaagtgccttgccgatgtaaacatcgaacagaacgtgcctttccatgccatttgtggaaacagtctcctgaatccccctcaactctattttcgtgtagaacagcctgcgcagctgtgcacagatgtttgtcccgtctgtcgggagcgtagccagcaacgtggcaaaatcatcataggcggcagacagcttctcctcaccgttgcggactccgtccgcataagaggcgaacaatccgaacaagacagtatctttcaagattttcatggcaataattgtatttgtttcatttacatgccatagaagggcaagaaagataccatcgtacgaatttagttggtagtatcaaagacaatctactgtattacaaccacttgtaaattttccaaaagaacatgtatatatcaatgtgtcgtgtaaaagccggacacgtgtacggaagccggacacgcggttattgaaagccgtacttccgtaatttctcataaagtgtgctccttgatattcccagcagccttgccgcctccttacggttgcctccggtctcttccaatgcccgcatgatgcattccttctctttttgcgcatcattcagcgcaagcgtctctgacgcatccgccccgtccgcttcccgaacggaaaaagccagacttccagcggctatccgttctccgtcgggcgtaagcagtacggcaccccttaccgtattcttcatctccctcatattccccggccactgataggcagccagcctgctccgggcctccctgtcgaaaccacctgtccttttgcccagctcggcattggcctcttcaagaaagaagtccgcaagcggcagtatgtcctccctgcattccgccaacaacggcaggcgtatggtaaattcattcagccggtgaaataaatcctccctgaaacgtccctctgcaatggccttctcaagattctcattcgtggcggccaccagccgtatgtcaaacgggtactccctcgtgtcccccagcggcctataccgtttttcttgcaacgccctcagcagcatcacttgtgtccggtacgagaggtttcctatttcgtccagaaacagcgtacccccgtcagccgtccggaacagtcccgccttgtcgctctccgcacccgtaaacgcccccttcagatgtccgaagaactccgatgccgccagctcttccggaaccgtcccgcaatcaacgggaacatacggcttgttccatctgtggcttcgttcatgtatctcgtgcgccacatgttccttccccgtgcccgacgccccccgcagcaataccgaaatgtcggcgcacgctatcagttctatctgcctgtacatctcctgagccttcgcgctttcgccacggtagaaggacggcttgccgctgtctccctcctttattccgacgataagctctagcaggatgtcaggctgcacgggtttgcgcagatagtccgtggcacccagcttaatagctgtcaccgcattctccacttccccgtagttggtcatgatgatgaccgggaccgtgcaccgcctttccctcatccattccagtagggacaggctgttgtcatccggcagacgcatgtcggccagtatcagactgaacggcttccccgcaatcgccctgcgcgcctccgctatggtcgccacgcactgtgtcttcatgccctgtttcaccagccaattgcttatggtacggctgaaaacgatgtcatcctctataatcagtatgctcttcatctatactctccctgatttttcttgccgactccgccagcttttccgctgcatggattatctccccgacttccatatattgcctttcctcccacacagccgccgtgtgtgtcaccagaccgcgcaggcggggcatcggaaagttcatccgcaccgtttcccataagggaaggttcttgtgcagcaccttgtgtatcgtatccctgtcatgcccgcaaagcgcattttccagtgtatggatgctctcttccgtttcccgtataaaaatatccagcatccttcccttgtccttttcccccgaaaggatgaacgagaaatcgggttctttcttccccgtttttaccaccatacggcttacggcgcttatcagttcgtccatcgagaacggcttccgcaggcagcccgcaaacccgaaggaaatataatgttcttcatcgtcggcgcaggccgtaactgccagcacgggtatcgtacgcgcgttctccatgttcgaggaacgcagcagatcaagtatcctgtaaccgtccatgtccggcatctgtatgtccgacagaagcaggtcgtatgttctttccctcagtgccgccatcagttcccgcaccgtccggcagcattcgcaccgcaccttgttccgcacaagcatcctgcgggttatatccagttgtatccggtcatcatctataaccagcacgtatgttccttccagtccgtagtcctccgcatacccgttttctccatcctccccatgcttcgccacttccgacagggggagggccaccctaaacaggctgcccgtcccgtaagggctctccaccgtgatgcgcccgcccagcagttccgtcagacgggagacaatggctagcccaaggccgaagccgggcaggtaccttgcattgtccagacgctcgaaggccctaaatatcctcttctgttcatcctccgtcatgcccggtccggtgtcctgcacgctgaagcgcagctctccctgcccgtatgccgcctgcagactgattttccccttccgggtgaattttatggcgttggaaagcaggttgttggctatctgcatgatacgcgggcggtctccttccaccacggtgtcaagtccctcaaaatccgtacagagtgtaagcccttcctttctgaccgacggtgtatgcagcttcactatctcatcgaaaagtgacagcggacggaaaaccgtcacgttcattttccccttgcctgcatccagcagataaaattcaatcaaggagttcacgagtcctatcatatagtcggacgagcggacgatatgcaccgcatactcatccttccgcttttcgtccacttctccgggcaacagctctgcataccctttgatggctgtcagcggcgcacgcaggtcatgggcaatggtcagcatcatgttttttctggattgcagcagttccttgtttttcaggtcggaagattccagttccctgcggtaccggagacacctgttcacgtcgcggtgcagcagggtatatagcacgatggcaagcaggaatacgaaaagggcaagcgtcgccgccgtattgtacgatttctcccggtctgccgcaatggcattgtatctcgtttccaaccgctcacccgccaccttgtcaaaatcaccgaccagcccgttcagcctcttgttcagcgcccggctactcaagtgcaggctgtccatctgggccgacagcttttcccgctgttccttctgcttttcagtcatttcgcggctcaacgcatggagaagatggacagcggcattgttcccgctgtttcgagtggtggacgacggcactttttccgatgccgcccgttgctgctcccgttgttgtcggtaagcggattttttctcttttccgccgaaaactttcttcagaaaacttttcttcttctccggctgttcttccccggtggttgctgtcccggcataagcttccttcacggcaggggcgaggatattccttgtcggctgcctgcgcacctgcctgacgatagccggcactttttcgcccaccgtctcgccgatgttttccagttcgtcaaacgtgctcatggccgctgacaggagcatctctttctgctcaagcagcaggcacagcgagtctatgcgttcctgctgttccggcgtatgtacaaactgctgcagttccttcaggacaccgcacgtcttttctcttctctcacggtatagccgtaagtcgctttcgctccaggtgctcaccacttcgccttgcgacgccagttccagcagatgaccgtaagttttgcgcgtaaggtcgcgtattatgcccagttctttcatttcccacttcagttcatcccgtttcatacgctccccgcggaacaggtaaataatgaatcccaacagaagtatcagcatggcataacctatgaatattttaagtttcaatcccattctcccaaccgttttgttctattcctcgtcctcatacgcttttctgccctgtgcactgcccctatgcatacaagggtaacgaaaaagctcaagaagatacagacggacaacaccgctatgactatccggcagttcataagtcttcatcgttttctcctgctccggcaaggtgcctcaccagtacgattccctcgtcatggattgtgaagaatacgcaccaggtgacgttcatcatgccctgcatcttgaaccgcacccagaaggtgtcctgtccgcaataccgctcgaaggctttcggcgttgccgccttcgtccggggaatgggtgtcagcacacgcacgatgcggtgcagcagcaagtccggaaactctttccttatcacactcacaggccttgtacgcgggcttacgaacagcctgtccgtttctgtctgtatttgtcttttcatttccggcagatagcgcacatgttgttgcacctttccacccgccacataagtcggagagatgtcctcacccgtcactgaacggagcatctcgctctgttcctgcgcggtaagcccgtgggcacgcatgaaggcatccagttctgtaccatgcacccgcaggtcgatgtttacttgcatcggggttccgtcctcgtcccgcagcaaggttattccgttgtattgaatcatttatggtttaaataatttattaatttgtaattcatggtttcttgccctgcctcacccatccggccttagtccaatccctgtccttcatcacatccggagccacggccccctcataatccgtccgttcaaaaaaggtatccagcacaaacctgtcaggggtcagggaactcacttcacgcgtagcgttaatcaggatataatcgatacccggcaacgctcccggttggccaccaatcagttggacaggaatgtcatcatctgccacagcctcgcgggtactgctgttcaccagtgtcagccggctatatgcggaaaccgcaatcggataccgtcggccatgagatttattatcatgcgccgtagacaggttcgcaatcaccggatgtgtatagaaagacggaacttccaatttccccgtcccattgcagctaaccacgctccacacactcttccgaataggtgcagtagccatcacatactgcaatttccccgtatatccttcattgaagcacaatccgttctggctggcacccgtactaatcagatactgggcattcaccgtccctccgttgaacataaacccgtcgccaccgctacagtaactttgacaatggtctatcgtagttccccggctcacaccgtcaaaggtcactgccccgccggcggcaccggcgtactccacccggacaaactgtagggaaccggaatcatcattctcctcagaacctccataagaaatatccgtagcaacagttccacaatataaagtctcacactcataactgacaggagccttccccaacacaatcacaccgtcccaactacccggttttttgatcaatgccgtcatcacgataggagcatcctccgtaccgttggcaacaatcttacacccctttgtaatgacaatcgtcgctttcccttgacccgatgcgggaagagctttcagcaatgcgccgcgttgtatggtcagcgtggcgccgttggtcacaaacacaggcttactaatcagatactccgtatcggtgtacaatgttctatcctcactaatcaccgaaggcagtacctctgtagtctccctgtcaaacatctcgtcctcattggagcaggacgtaagcatactcagacacatggcagccaccataaagagaaaagcaacaagcgctttccggcaaaggattatttcttctcttgtcatcacaatcttttttagtttaaacttacactggccaatctctgtcaatcaacaaggattgttcagaaataacggccaaacaatcttttaaaaacgccctttttctcttccgctttttggggtatattctttagttcctgaatccgggcttcaaccgatgccagctcgcgcatctcccgttgcgattcttcaatcagtttggagtcgcagaacatggtagttcctcgttgccagaatccggtattttcttcctgtatttcttcgtcaggcattataagagtcaatggcccctccacatagaagtaagcctcccccggctcagccgctctacgtttttccttttcctcacgccgcctttcctcggccatcagcatttcccttcgtttcctgtcgcgttcttccagttccaccaggtcagccagcctgccggtattataatactccacctgcgccctttccatgctcaatttctcttgcatgtacaacggtatctgttcccctttcgtcattgcgtaggtgatgaatgtcttgaagagatacgcttcgtcatttaacacaatccccagcgcaacgccatgggaggatgcgctgtatatccgtgctccggtcacccgttcctcgctgcccggttgcaggccgtagcgcatcacgaggttatccttcaaataagtctttctcaaaatctttccggacagcgtactgtgttttccccagtaccgttcacggtaacgtataaaaaaatggggagggaaaacaaaaacagcattctcacccgtgtccatcgtgacaaagagataaacatggaaaccggcattcgatggtaccaagcaatagaactggccgcatctatctatagtctgctgcttccattcctgcttgctgagaacatagaatctcactccccattccattacgggagtgttgattaaaacagaatcaaccccggacgggaatctggccattccctccaccttcggattcagcaggatatgctttcttcatgctttggaacgtacattagtcttaagatcctcgcgaagcacctcaatagtttcttcaatgctcatcttggatgttaccatccgcatgggcttcttatccggtttcgtttcttgtttacccatctgtcatgctgtttttagttaaagacaaattctcttcctccgctgcctttttgaatagacggtccatttctttcagcacactctccagcgacattagattatcgtaagctgtaggctcctttatttggggcaccgattcaacgaacgtaccaaactcctgaagcaacttagccggtaagtgattgacggcccattccagtagcggcaagttgctttttaccttttcatccataccgttatgcacctttaccatcgcctcattcttcagcagagccatctgcgggtttatcccggcactttccggatgtttccgtttctggtcatccaatccggcagtcaactccattgatttgcacagtttcatcatgtcatgaagcaaaatgtccaatgctttccggtctttggccgattcccgataaccgttacatttcaagatgaacagtttcacggcaagcgctccccacatcggtttcaagtcctcgtcatcaaaaaactgttcatagctcattatcttattgatgaccgccagtttgccgtccttatcaatttccccgaatccaaccgcatccacggaggcaatgaatatcttatcaccagccgatgcctgctccttctcttcctttttccggaagccgacagcaaaaacgtagtttcgtccaaagaaacggtacaacaaatcccggtcattcgctctcccatctccgtacaaagcggacagaccatccgcatgggaggagaacatcaccagttccacccccttccaagcggcagcctgcaagtccagataagcagccaccccatcttctgcattacccagcagataggcgcagaggaagttcttataactgaacttgggcacttccgatttccggttcacatgccctaccgctatccacaagttacccgcagcggtccgaaagacgcacggatcatccgtacaccatgggaaggctgtcactcctttcagcacttcccggtagttctgttcttggattcgttgtgatatcatggcttgcagttccggcatatcagtctgcatcccctttcttttctccgatgtggacattgtttttgttatcacgctgtgtccctccttgttaagtacgaacgtattcttatattactttctcaatgcttttccgtcgtatgtcacctccttcaacatgttcttggcatattccacagccttttccggcagcggtgaacattgcacctgggtagtgatagtctgagcttccgggctgatcagccattccagcagcttcacggtttcttccgcttcactgcgactacgcccggcatagttctgctccttataaagtaccacccatgtgaagcaactgataggataagcgtcggcaacctctgaatcggtaatcatgcccgtagcatcccccacgcttgcgacagcggtaacgctttccgaagtgggctgcacaaagtttccggcagcgtttttcagccatgcactctgcgtattgaagctggctgcatattccgaagccacgtatccgatagcacccggaactttacctaccagtccggccacgcccgtatttcccgtagccgctactccacgtggaaaggtcaaggcttttcccgtgccaatcttggccttccagtccgtactcactttcgtcaggtagtcactgaagatataagtcgttccgctaccgtccagacggaaaacgggatagatttccttgtcgggcaattgcttgccggcgttcactgccgcaatccttgcatcattccatttcaatatcttacccatatagatatctgctatcagctctcccgtcaggcgcaggttatccacaccttccaggttataggcgatagtcactgcccccatgcacgtaggtacaaggatagattttaccggcagactgtccagttccgctttggtaggtggaacgtccacacctgcaaagtctatctgttgattcttcaggcttctgaatccgcgttccgtaccgataccggcataagtaacggggatgtcgttcttctcccagtacatcttgaacgcctcgctgtagaaaggtaacggcaatgtggctccggcggcggtaatcaccgatttacgacccacagcggcattttcggataactcctcaaccggttttccactggtaaataaagttgctgccgctattgccagtacagctacgaatgacaggcatacaccgcctgttttactgatttctttgtttctaattgttgccataagcatttttattattgattaaaattatatccatttcagacagagtggaacaaaacgaaaccgtcccgctaaccaaagtctttcgttggttagcgggacggaaataaagaatatgtctgagtgatcgtttaaaccatcattttcaaatcataatataataaccttgtatgagaggcatcctcatcacttgatgtcaactctaaaaaattattcttcagatagaaaggtactgcatcaatataggcatcaactgtaatgaacctacatccggtcttattgttaataacgaaatagcctttaatgaaattaagcaatttgctgcccaagtgcaaattatgtgtcgaaacatctaccccaaagcggcagattttcactgctggataacttttcagacgcttctcgttaacaaagcgttttttccgaaagcgattaaattccgtcttgttctcaaattccgaaagagaaattttatcatttgccagactgaaatatgccaaaactttgccaaaggcatcttccactacataactaacagcaagcagttcatttctataaatgaaagattcattcataataaaatcgttcaaatccgcgtctccgcaatcgaacgattctattctctcgtgttcatccaaacggcgaacaccaaactctggattatttatttctgccatcagtttcttctttaaaaatgctcatgatgtacttataatcccgttttatctcttccagcttttccggagtctctttcggtggatttttcatccgcgcttcaaatctccgtgcatcctccccgaagagtatcggggtttcttttatcggtcttgccattattgcctcctttctctattgttatctgcaaaggtaatgctatttatgcaaatacacaaacggtcaaggggttatctttatttccgtatatgtcccattctgtcaaagagcgattgtttttcaaggccagagctatttctccaatgacgatagacagctctgccttaaagtcattaaaaaaggttatcccagtggattttcttcttggtttctattccttacgtgttactatatatgtcattttattattgttaacacataaaatttcatggtctgcttatttccaatgcctcaattgcatttatcgtatccttaggatattcaaaatgcacggaatcacatgaatgctccactctgacctccgcaaatcgatattcctttgacttcttgggtgcatcccacgatttgttactcaaaaagacacgatactcatagatacatccttcatacagttccggcactatgtaatccaaagtatcagggatattatccgcatatataaagtcatttataaatttggtatagtcccccttcggatagtatattcttaaacaaaattcggccttctcataagtgtccgtatttgtgatattagctttatcaataaacctgaatacgctttctttctcttcaggttgtgtctctttctcattatcatcgttttgacaagagaatagacaagcaaggaacagcagtacggttagtcttctcataatcaatagtctttaattgttaatgcatttgctttccatatagtgatatatccaatattaattctgaaatacctactctttttttaccgtctcaatacagttttctgtaaaatctaaaatatttagtcttgctgaaatgtctggtttcatgagcaagcacccggtctcctacactacattcctccaggggatcatgtattttatactttttcgtatattgtactgttttcccatacttcggatgctttttcgtacgttccacctctatgacaaccgtcttttgcattttcgtgcttaccactatcccctcgatacattgccggggtattctttttacagctacctttggagagttccataagaaaggccgtaaacggcacggcaccatcttaatattgaaatagctgaaaatagcgttccattcactcatcacattcagcaagccgttatattgctgtgcagtgatttgtttggtattgacggcttccagcattccgaacagttctttcactttaggtatgataagttctatatccttagtttgcggattacctgtattcagaagatgaaatacccggctgcacagtgcctcatgttctttcaatatttcttcaataccattttccatacaatccgttatttgaggttcaatgcacaatggtagatatccaaatatcccatcaggatgatatccgcataatcaatgatgctatagaaatccgagataaatacccgttggttcgttttgataaagtcaaactcactgtcgccccagttaccgagaggataactgccgatggttttcattattccacagaattgttggtgcaactggaagatttctttctgtgcattaagtattttccgcaatatggctttcatctcgcaatcatttatcccggaaaactccacagacaagtgggattcgtcctttatgctcaccaacagattttcaaagcagggacgcaactgggcagaaagttgtgtttgagcgatacgtgccgacggcgtttgcagggattctttcagtgcatttcttaatgcccggctccggttggtcactattttctcgtagatgacgggattagtcaggaaaacagctacaaggcgaaaatcattactcaacgaatgatacttctgatgtatctcttttattgctttggatttgacggacaattgcttcagaaacaacagcagcatttcattgtccgcctgctctttattcattccatgcgcaaagaacttgtcattcatctgcatggtaaaacccagaatagaagctatatttgctataatgtctatcattcttttattatttcaaattattcaatgaaagaaagcatttgttttgatgtctgaaaccgctttatcgaagagctttagatagccctatctaatctccttagacagctctgtctaaaaaggccggataagaggctttatcctaaaggattctcatccaagtttccatcactggtatttccaccttcagaaccaccactttgcccgatggtaatcactttgctcgtactacgcggagttttcagcaatgtatttgtaccactgtattgcgtagtgaccgtcagcgtgtagtgaccgtccgttaaatcggagggaagcaagataatgagttgcgaggggttgttcaccaccagcatatcattaggcagcttgctgaccttgccggaagcatcagtcagggtgatacctaccgattcatgttcaccaacgacttttatcaagcgtccgttcagggtgtagttgcgtccggcggttgccatgccgtccgtggcacgggtggcggcatcttcgccacctattatatacatggcgtcccgtttctctcccaagatgttgactgaagtctgcgcaatagcttcgcgcaagtccttgtcctgggtaaaggagacgtagattgaattctttttttgatcccactgtccgccgtctactacaccacggaattggggtacggctcggaaaagtccggtattcaccgaatagccgctcagtatcaagtctgacaacacacggtgatatagcttcactgcgtgctcaatggtttcttcacgaagacctgtgtcttctttcttcatttcgctaagtatatcctccagcgtaaggcttccggctgattccaacatcaggattttgtcttctttgttgtctacggtgacagcattgtctaccagccaacctttcagggtgtgtttcatgatttcttttcgtttttaattaacaaatactcatttttaggaaaagcacctccgattaattaattttatcggagggctttaagtaccaaagctctatttccaaggagtagataagataaaattgcattgcacattatcaccgccttgatgtgaaggatccataaagcgaaatgtcatgaatttattatcagaagttcctattggaatacttgtattaaaatgttccagattattaactatcatatttccactctcatctatcaaatcatatactccgtttactacaccttggccaaatgcatcattatcgatttgaatatactcagaaatctttccagcttccaaatcaattgttgctattggggctgtaaattgcatagcatctaaatccatcaaataaactaccaatttcaacttgtcatggccgggaaaggcatcagcagtataaaagaaacgaattttagtatattgtcgagattccggatccgcttcttcaccatcggatatatccaagaagtctgtatcggacaactgcataagactgaactggccttctggcataatagtcatatcttgttcataaagaacttgcccatcaacattgcgcactatttttaatgtaccgcttaagtccgcttcggctatataattctttaccttatttgataattctccattattgaacgtaacggtatataaatcagtattaggattaaaatagctaattatgggagtgaatgttgtatattcctccaaagatgaagaaatagcaatatctcgtcccacaagtttaagcaactcaatgtctttactattatccagtgttatctcttgtgacaattcgggctgtttttcgcctattttatagacctctagtttaagagtactattctttttaacagatgttgaacgattaatacttttttctccattaaaataaacctcataactacttcttagttcttgttgtacaaacgatacagtacaagtctcaaatcgcatgtctatatcctcaccttctgtttcacaaccagcaaagacaaatataaaaatgctaatgatgagactgtataaaaatttattcatcatttttcttcaaaaaagagccgaataaagagggaggctaatccctcttttatacggctccaaattattcaacaattattttacccacgcttgagttaaccagtttgaacgtccaccaacagcacctctgtaagaagtagtcgtaaaccaactatccaattcactaaaatctgcacctgcattggctggagatgcattaggcatcaaacctgtatatccaccccacggagaagtcagcccaatagcctcagcacttgcagcagcagtattagtcgcgtcagctgtgatacctgaaaatgtagtactaacaccatttacaacattgtttttgaaaacatagctgttagtggtttcacacaagataccggtaggatatccgtaaagaatactgttcaccaaagtaaattggcagtttctacggaagttggcacaagatttcatggatttaccatcacccattgcagattgtgcaaccttaccattaacggttccaacgattgttaagttactgattgtcgggtgagtgaacggagttaaagatgaactgcttccgtcgttatcacattcaataccattcgggtctttagtgtaataggtactatttgcatctacagtggctaccaagaactgaagcttaccagtgtaaccaaagtcgaagtcaaaagcatcgtcgtgcgtactggtagataccaaatacttggcatttattgtaccaccgaagaattcgaatgcatcgtcttcaccgtagtatgcctgacagtggtcaaaagttgtacctgcacctacaccgccgaaagtaaatgaattcaattcattgtcctgcgaaacgttggcaccggcatattcaacacgtacatactgaatcgtaccggagttatcgttagcattgctaccaccataagtgatatctacaccggcaggagccgaattgataccttcaataaccggattgttggtttggttgataggagcattacccaatactacgaaaccaccccaaccaccaggatattgatgtgcatcttctgccgtcataacaatcggagcagaagcagtaccaacagcattaatcttaccattacgggtaataaccaaagctgaagcttgtgccggaacatcattgtacagacctacaatttttgtacctgcctgaatagtcaatgtagcaccaccggacacataaaccttgccatccaaatgatattcatttgaagcactccaagtagtattggtgttgataacaccagacacttttacgattgcagcagctgcacgagttccaccgtcaatgggtgcaatttcctcgttctgactacaagataccacggctacagaggctactgccaaacttgtaacacctaacacgtttttgaatctaaaatttttcataactgaacaattttaaaagttaataaactatttatttaacacaaaaactaaaatttatatccaactgacagagaaaggtttatacctttttttatccggcttagcacccaatctccgctattatagttcatatttgaagttaaatcagcatatcctttatcgttattcgggtcaacccccggttcatatccgcaattgcgataaactatcacatcctggtttaagaggtcactggcattgaatttcacttccaacttttcttttaggaaacgggcagagatttgtaagtcaagtacgtctctcgatgcttcgtattggtcatacttctcgtaatctccggcaaataacaatttacgtccgttacgcccatagttcaatgcagcaccaagtatctttccctgataggtcaatccggcatttacagtatatggagacaatccttgcaatgggcggctgcggtcttgcgttttaacttctctgtcaatcccggaagcagcgttctgcaatcgttcaagattgtatgtaacgtctccactcagaaaagtagcgtttccactgacatacacatccttcaagaaagagcccggggcgatgaaagccaatgatttacgaagattaatctcaataccctttacgctggcatcatctatattgaaaggatgcaggacatatcgtaaatccatcgtctttcgcgttaccatttcaataggggatttgaatttcttataaaaggcacttaccgaaaccacttcacccgcttgtggataccactccaaacggaggtcgaaattatccgaatgggattgcttcaatcctccacggcttttcacttctatacggtcgtctacattataatagttacaaggggtaagttccctgaagtccggacgcgcaatggtgcggctataagcaaaacgggcattgatgttgtccgtgatgttatagaccagagtggcggcgggcaaccagtcggttttctttaccgagaccaaactatccactctgtccgccccaattgttgtttgcacttcagtagtggcatcttccatacggacgcctgccgttaagtgcagtttacggaagaacgtaaattcacccatcaaatatgccgcatgtatattttgttttccttcgtagtaatcggcttcatttagtcccgacaagccggacggcgcataatagatagcgccacttgcaaagttcttcgggtcatacaactctcccaattccggatgcgattcctgtagttctttccatgcgtcccatccttctcccttgttgccaaacatggcatgaagatattgctgttcataattggaggtacggaaagtgcccatatatccggtcttgatggtttgcttgtttccctttactacaaaaggatgttccagattgaatccaatggttttcttcttctctttcaggttactgtacatcaagtgtccgtcttcaagtccgaactggctgctggtgacagtgctgctccaatcaaccaagccgtcttccacatttccttgaacattgcccaatgcgtagcggtcatccggattggtacggccaatctgattataagacgcattccatgtagctatcaggttttcgttgaacaaccggtgctcgccttccagttgggtttgccagagctggctgcgcaatgggacactatacagctcataggtattgaacgctgtagtatatttaaaaatgtaacgttcaagattggtatgttggaaacggttgttgaacatgtttcgccacgtaatcttatggttccggatttcccaaccgacgtttgccacagcgccgacagaagtcacaaacttatagcgtttacccggtccgttcaaactgtctttagttatggtgttcatctctttatattcttccgtagtctgttcattacggtaggtcaaagcggctactacccccagtttgtgtccgtaacccaattcgataggagcaccaaaggtaagagagtagttctgtatcggcatagctgtgaatttcttcattccgaaagtatttttcaatgcagcattctgcgtacctatcttaccttcgtcttcacttctgccggcataccattggcggtcattcatttcaccgaacagccagtcggatttgaaacgcttgttgctcaggaagtcttttcccgtactctgggtgttcatacctgtacccagacttatatcgagaaacttcttactcggtaccgccaaggtttgtacttctatcaatcctccggtaaattcacccggcaggtcgggagtaaaggtctttgcaatagtcacattatccaccaaaccactcggtatcacatcgaaagcaaagtttctgcggttcggctccgtacttggcagggatgcaccgttcaactgcacattgttatagcgttcgcccataccacgcacatttacatacttaccgttatcaatcgtcacaccggacacacggcgaagcacttgcgccatattgttgtcactggttttcttcacaaggtcggcactgataccgtcactcatcgcaaccattgtcttttgtttggagtacagcgcattggcagatgccttgttataggtagcggttaccaccacttcattcagcatctctgtctcatcttgcaggattacatccaacggagtagttcttccccctgcaactttcacgtcgctgatgcgcattttctgatacgagatacagctcacttctaccatataggtacgtgtcggcacatctttcagtgtgaagtttcccttaatgtccgttgccgtaccggtgttgctgccggcaatgaccaccgtggctcccggtatcggaaatccgtccttatccagcacggttcccgtgatagtcccttttccggaacttttcttgtttttattatcgtcctgatatacggaatatgattccgctgatactttcttatatgaataaccggtgtttgaaagactgttggataaatccacctctactgaattgcgcttggtcgcggcaggcacactaatggctttcatattcttcccgtcgaatgcaacctctaccttatacgtcttggcgatgcggttcaaccgtagttccagtgcctctgccggatagctcgttgccttttggtcgtcactcgcatggcagatcggcgatagcagcaacattcccagtaggaacaatatgcccgttcgtaatctcattttcttattactccttttcatctttaattcgttaatattttacttaataaatcacttattttcaattagttaaactttcattttccatttccgaaaagacaaggcaatggccgtttccctttacatagggaaatttctctttcatgtatgcagctcgccaccgcataccacaggcttgtctttctttattctttcgttacgcgtgcagtcctcgtaaggtggcgcgtggatgtatatggttaccggcttacaacaatccggttgtcactgatttcatatcgcgtaccgtaaatggcacatatatttttcatcacattatttactccggattgttccggcctatacgagcaataattgattcgggcgtccgcaggtatggcatccttctctatcaccagttcccggtggaaacggttcttcacccttattttcagctcttctaccgtagcatcctccagtacgaaaccaccggtagtccatgctccgatattatcgggattcaccgtgtcatgcgaaactctgttggctgccttatcataaaccacccggtcgccacagtggaacttaccgaaagattgctcccctttcgccacttccacacatccagtgcggactgcaacctggctctccactgtcccgccgtaagctaccacattgaacgaggttccgtgtacaatggcattgatctctttcgcctttacaataaaggatttcttcttgtccttggccacctcaaagaatgcttctcctaccaggctcaccgtcctgtccttcttcccgaagttgttcgcaatgctcagattactgccgcctgcaagataaacaaccgtaccgtctgccaggtgcaacacactatcattctggcattggattacattacatgccatggcattcgtactatccgcaaatttttcattcatatagaacgaaattcccaacaccaacaggacgcttgccgcaattccggctcccgcatacttcattccacgggagaatggcaatctcttttctttcttcacctgtccggccagacagtccgttcttccttctattccttcaatgccgatcattcgtgccagcatatccaagtctcttttggtcagctcatccagttcttccggcgtagccgtttctttcttacccttactactcttaccggtaacatccatgattattttggagatgccgtcaatccgcttgagttcatcctcagtagcctttccttcttcaagtttcgagtagagagaatctatacgatcccatacacgttcttcttgttcggaagttactttctttctatttctccaaaatttaatcatatcaattatctgtttttttaatttgtcctacattcaagttctcgcatcactttgagaacccatacactaataaatcgtttgaaccccctaaaaccttcctttaaaaatcgttaaaatcaaaggatttctgcatttatccctgttttttaacttttccggactgttttccggggaagtgggcggtcaaaacttcaaagagcaacgggcaactttcaactgggtttcaatttccgttcaagtacccctacactagtaaatcatttgagacccccaaaaccttcctttaaaaatagttaattttggaagatttctgcattggtcttctttttagcctccctccgtattcagatttatagtaacgacttatatgtataaaatattacatctacaaaaatactctaaactaatttatcaaatatggttccaatacaaatttgttggcatatctccgtgcatccacccgattatcccgtcaaatattacagttctattgcatgaacattacagccatgtaaatcttaacagcccatcaatctttttaatagcttgtcataactctgaaataacctctttttacttttgggacatgaaatcctaaaaagaattatgaataaaaatctatcaaaacaactaaaggagcagcaggctgacaagattttgttacaggctatcgctgcatctgccgatgctgatgcatttttaattctttataatcggtatagccaaagactgctacagtatttttataatgtaacggacaatgcagataccgcctttgatttgagtcagaatttctggttgaacatttggcagaatgcgtcccaactcatttacgaaaacatggattcggcagaaagccttttcttcaatatggcaacaaaacgtatagccgattactaccgttccccccaatgtagcaaagaaatcccgttggatgattttcccaacctctccgacaattacgcatccccttcatcacccgaagctgactattacgccgaggagattcgcaagataaccgagaaggtactcagcaaatatcccgaattggacaaacaggttttcatctaccagaaagagttggactatcctgcccaacgaaccgccagccagttcaatatcagcattgaaagcatttacaagaaggtatccatcataatgaaggatctgcgcttccagttcaaactggccgggtattactacagcctgctcacgtgcatctgcttttgcagcctatcatagcaaacagtcacaaccaacacaaccgatatattcgcagcaaaagaaatccggagatttcttaatcgtagatttccccccactccaggctttcaaagtaatattgatattccgtattccctttccacttctttaggggaacataaacgctcaatccgcaatatttatttctgtcgataaccacatacttgaacgaagccgtagccgccgtataaacaactgtctttcccaattgtgcctccagcaaggcatcatccgtatttttcagcctgttcaccatatctttcaaatcgaagaatacctgcggcacgtcactcgtatggtacacctgcaatccgctgacatccattccagccgcatctgccagatgtccggacaacgccccatgaaccacgtcatacaacccgtccagttgtgccgcatccaccagtgtgatggttgccgaacggagcacatcatatttcatgccattataatgctgaaaataagcgttacaagcctgtttgagtccttccacaccgccgaacatatacggcaacacctttgcatacggaatacccgatgcatcgtagcttccttccgcaagcacctccgtaggcgaagctatcagataatcgctcttataccgcaatgcatacaaagcttccacactacccatcaggcacatatcaaaccagatatactcggccacatgatccggcagacccgcagccagcgcatctatctctatcatggtatccacggtcacattgcccggatgaaagtccggtccgatgtagcgtgtacgcggaaatgcctgttctcccttatccggccatacagaccgggtacggctatagccgctcggaacccaccccatggaatgtgaccacagcaccagcccgaacctttccgacggaaccagttccttcgtttcttcaatcacccgcaccagcgtttctacattggcagagttctcttcctcatagtttttcagcagcacctcttcgcctgcctgcgtaatcttgaacagacgcggcgcttcgtccatccggtccacatacaccaccgctgttcccgcactccgctttgccccggccttcagttgactgatactgtagtccacatcactatccatcgtgttatccgcaaccatatatatcagtgtggtataagaaataggtgtaggcggaagctcatcctcatcatcgtccgaacaaccggttaatgcgaaaaaaagcaggcacatccccgacaggaaaagcaggttatagcctctgaaaaatgcaataacagctggtttcataacagtattcactaattattctttccctttattctctggatatcccagccaccgcatcacgctatccggctggttggtaatgatggcatccacccccaacgtcttcaaccgttccgtctccggcttgtcgtccaccgtccacggagccagttccatccctttggcacggaccttcccggcaatctcctccgtcagcatatcgctctccgggctatacacttgcggtacaaagtccaaccgcgccatcagttcctcaaaggtagcgttcttatcctccaccagataggacaaacggacatccggatatttctggtgcagatagttcaatgtacgcacatcaaagcattgcaccagcaaccgatcacccagcttcttgctcaacagcgctttcatgcacaagttcgcaaacgtccggtaatccggcgaataaatcccgtcctttgacggatcggactttatctcgatattgtagctcaccggagcgataccattactcttggtcaaaagttccaccgcgtcaatcaaatccgtaaccagcggtacgcagcatttcacattcttccgtcgcggatatgcaggattcggaagactgcccacatcataccgtcgcaaactgtcatacgtcattgcgtatatcttataatccttatcctccccagccggaatcggttccccttccggtgtcaatgccttaacatggttcaggtaggcatcgtgcgacaccaccaccatactgtccttcgtcacgtgcaagtcaagctccatcaccgacacaccgattgccgcagcatgcgtcattgctagtatcgtattctccggataaagagccgcaccgcccctatgcgcatgcacaacgggcagcttctccttcacgggtgcctggcatccgccaagcactgttcctgccgccagtagcaggcagacagacagccataatctacttttcataattttgtgtctctgattattaatatgacaaatgtagtgaacggatattacgatgtcactacaaacaggaaaaatacgggctaaattaaccgctttattacaagagacggacataaacacataaattccttatcgtgaagaagataaaacatttcctttatggcagctcatttgttatgttgctgtaacattacccgtcgtgagctgttaatgaatgataaatacatcacccgaccgccaagcggtttggtgtttttcagtcctcacctgctacatttgttccggcttaattgtaatagatatatattgcttgttcgtgagaacgaatgcatgtattttttagagtttaacggctggttgtacaaaacttctataaattcaataggtatagatataaaatcagcaaatccgtgaggacgtattatttgaagacacacaactgaagaagtgcgctatccccaaaagatagaggtactttttttatggttataaatatccggctctttttccccgatatagaatccgattataatcatataaataatccagtcggcacagccttccgaatcttactgtatttcagttctctttttcccatatatagccatttcctcatttttatcaccctgtcagtaacttcaccttgcgtggttcagggtgcgaagctacgtccgggtcccctaaaaatctgcaagcccgcttcgcgccctacgggttttggcgaaaatttttcaatccgtccagccgggcggttgaaaaattctcaccaaaagccttgcatattttctccccgtccgtatctgccccctgaaacgagcaaggtgaagccaccgacaaggcataaaaaaaaagtcaatgttatgaaaaagagaactgaaatacagcaagatttgaaacgaggcttcggctccgctccaaccggcattaaaaatttggtgaagtggttgtcggtcggtttcatggtctatgtggcagtacgtttcgtgtgtgcctttgtcggtggtgtagtggttggcttgggcggtgggttgcccatgttggcagttttggcggtggtgtttttcctcatccgtgccgtgtggcgcatcctttccgctttcctttccctttgcgtgctcgctcttctcatccttgttctttgcgtgatactctgacagaatattaatcatttttaaattaaatcattatgactaaagtacatttattgggagctaacaaaagttacgacagaagcgttcagaccgtttcagtcaatcaagtggtagtattggaaggctacagctatgacagctatgttgtgtatgaagtaacccgtgacaagtggggaataacctatcatcttgtcaatttgcgaacacacgagtttcacacttccgaccttatccggccattatcagagaaattcggaataggcatctattacgatgatgcgaaccccaagtttttggatccgttggaaacagccgctttactgaccaaagcgaaagagaagaaagccgaagaagaaaagaaagcgaaggaagcaagagaggaatacgaacgtatcgccaaaatcggtgcggaacgtttgcgcccccttatcccgacggatgcaaaggcggtcattatcggcacattgagagtgaacgaatgcgacagttatacggactattacgactatagtatagcaagaaccgtcattttaggcttttccaaacatacacgcaacctcttttcggaaatgcgcaagcatgccgccaattttgaggaaacggcctatttggcagaatataacgcagattacgaacaccgtgaaaattacagcatgggggacggcatgtatttgggcaggaacaagtacagcggttggacgattgagaaagagcctatctgtgaccttgaaaagttcatagaacggtatgcgcacaccgcaggggatgaagccaacctttgcatgaaagcaccgcagagggaaaacgaagcacaacagccgacagcaaccgcagacccttcaaccctcagtcttgaaatcgtggaatacagcgaaaaggcgattgccgtattcggtgacaccaagccaataaaggacgttctgaaaaacttgaacggtctgttccgtgcaaacctcacttataagggcgaaaggcgtgcagggtggatatattccaagaagcaggagctgaaagtaagggaagcactcgccacgtgcatccgcgtatgacagcatgaacggcagggcggaacaatccgccccgcctatcaaagaaccaaaaagtaacgacatgagaacggaaacaagaacatacaccctctatcggataacagagttatccgaggaagccaaggaaaaggcgcatggcgaatggttatacaatcgatacttttacggttggacttacgagaaccgccaaacccttgatgccttttgcgaacacttcggtatcgtgtgccgtaattggagatatgacgcatgtaattatagctatgactaccgcagcaggcaggaagactgcatagacagcctgagcggttggcggttggtggcctatctgatgaacaaccattggaacgacttgtacacccgaaaatatttttggaacggaaggaaagggagagaaagcaggatatttgtagatacctgttgtccccttacaggctattgtattgataacgatattctcgatccgatttatcggttcttgaaatcccccaccgggaatgtcacgtttgataaccttatgaacaaatgtctcgacagctttttccgtgcttgttgggatgatatggagagcacccagactttggaatacttcacggaagaaagcaacgccaacggttgggaatacctttcagacggaaaactattcaattaattatcaacatttaaaaacttaccattatgaagacgaacaaaaaagtacagaagaacagcgtacagaaatcagagaaagaaaatgcagtaaaagtaactgctttggcagttatcccgaagccgataatgttactcacaccgcaggacgtgcccacggctaccgaagtgacggcccccctcgaaacggcaaccgttcccaccgttacggaagaaacaccgcagcaggtcacgttcaagacaccgcttgcaacggccacagccgaaacagaccttgacatcaccaccatacacccaagcacggacaaccaccgcaagacgttcaatgacgcatcattgcaggaacttgcggaaagcattcgggaagtgggaatcctgcaggccattgcggtacgcccacgcacggaaggcggttatgaaatcatatacggtgaacgccgttaccgtgcctcattgcttgcaggagcaaagaccataaaggcgaccatatataataatgtgacggacgatgaagcggaagacatgtcgttaagcgagaacttgcagcgtgagcaggtacgccccactgaagaagcaaaagcgttcaagcggttgcttgaaaagggcagatatgacatgtattcactgaccgcccgtttcggacggagcgagaaatatatctatacccgattgaaactgaacgaactctatgcgcctatcggtgaactgttggacaatgaaacaatcactgtcagcgtagccgaggagataagcacctatgaacccgatatacaaaaggacgtgtacgagaagcacctcaaagaggggaacggtgaggattggacgggatatacattgaatctcttcaaaaggtactttgaaaaatactataccaccgaccttgggcaatacaagttcgacaagacggaatgcaaggcatgcgtacacaacgcagccaattacaatctctttgccgagcataacggatgcggacactgcacaaaccgcaaatgtctggaaaccaagaatgccgcccatgtggcaaaagagacggagaaacttttgaaatccgatccgaagttggttgtcgcacgcccctactacggaagccgtaacgatatggcactacagaaattggacaagaaagggcatgaaatcaaggaacttgactacaacgtatcggcaagggaatttccaaaagcccccgaagcaccgaagaaagagcagttcacccaagcgaaagagtacgaacaagcggtgcagacatttgagcgcagaaacgaggaatatgcccgaaaggtggaggaacttgaccgcatgaaggaggaaggcaggataaagacctatgtgaaggtagggcagacggaacccgaactctgctacgtggagataaacaggaaggaaaccgcccccgtcactatcgggacattgcaggagagggacaagcgtttcaaacagctttctatcgaaaagaccgttgccgacacgaaaaagattgtccgggagaacgactatcccgaaagtccgttcacgcagtacgaggacggcatgatttatttcgtcatgcttacccaactgcaaaggaagcatttttcgctttttggcatcaaggaccagcctttcgcattggacgagaaacagcggatgaaaatcgttgccaaactgacggacgcacaaaagacggtaatcaaacgggacttcatcagccacttcctttgtgagaacggccacggagacaacaacgcatccaagctgttaagagacttcgcaaacatgcactttcctgaccagtacggacttgccaaagccacccacgaggaagaatatcagaaacggcatgaacgtttggaagaaaggataaaggaaatgaagaaagcggaaaagaaagcagccaaagaagcggaaaaacagcagacggcagaaaagacggagaagaaagtcaccgccccgaaaacggagaaacccgaaagcggaaaagccgcctgaagccgaacagaaagcatgtgccggagacaacatccggcacatctttttcaccgccctccaagagaacagagggcagggccggacgaccccacccacaccgccaccgtaaaacctttaaaaatatcagcatatgaaatatataaaaatgtcccctaacgtggagtattccaccgacagggagtttttccttgaacatcaaatcctctgcatcgtgagcagggaaggtacaaagttttgcagtctggtagagaaccgtctgtttatgcgttcccaaagccgccatatcagcaagcagatgcagatgcatatcatgtgtgaaatccacaaggacatctgccgccttcgctatggcggcgaacccgtggactgacctgccacaccccacacctgaatacttcctcttaaaaaagtcgggcaatccctatgcggttgcccggcttttttctatttttgcagggttgaaccaaaaaagaaagttataagattaaagattttgaatgataacatattagaatagcttttagctgtttgttcttactctcgaaacgaccaaattcaatgcaggagaataaacgggcagagtccttgtcatacacaaatggcacggtcttaactcgtttcctgcatgggtgcttggtcgtaccggagagtagaacctgttaagttccgtgcttttttggtacataacaggaagttacggacaaggtattactcaaaaatcacaggaagatgtacaacaagaacgttgccattaccggcagtaccattgaaaagacaaccaaatacgaccaattcagggaagataaaatccgtatggaactctaccggataatccttccactttataatgaaggttatcgcacattcacctgcaatccgcattcctatatcggattattaggtgcggatacgatagtcatgctgcgtgaagcgggcaaatgcccggagataatcctttcagtagccataccggaaaccgcttttccggcagataccgacaaggtgtatcgtgccctgtatgacgacctgataaagcaggcagacaataaaaaaatacttccggaaaaagagttttttggcaatgcgcttgtcggcggtcatatcatctgttattacgatgacttttccacagaaatgcagcagatatgcgcatccggtactccctataccaatatccgtaaaatgatataggcacacattctttaccgcaggttacagcagtttctccagccgtgcaatccgtttttcggtggacggatgcgtactcatgatatattcggtgaaagtcggatgctcaccgtaaacgtcttccgtccttttcaaccggcggaggaaagaaagcaatccttcgccgcaaccatatttcactgcataggcatcacaacggtactcggcatatttattgatattcacgtcagttatccggctgatgccgtatataatccggtgaagcagtttgtaaacgggccaccataacttcgctatgagttcacctacaaggcccaaagccggaaccaatgcgaacaccatgctgccaattatcccgaatatcagagccggaataagaaatataccataaaggcagcggtaaccgaacgactccatcgagaataaaagcacctgatagacgaagtcgtaatgggagatatgccccacttcatgactgatgatgcccttcagctcctcatccgaagctgcggcgagtactccgcccgtcagtcctatcgtattgaaaccgaatgcggcagcatttacccgtgcgtcattgttacgataaagtttcagcctccggttcatacccatttctgaaagcaaccgttccagcctcatgcgatcggaactgttcaaaggacggtatccttcttttctgcgtagcacccacacatttagcggagaaatggaataaaggatgaataacagcaaaagataatacggtaacgtattgactaaatacggaatcaccccctcatcaaacagccccggtatatatgccggccatatatggcgcaagattgaaagtagcaatgcgtaaaacaccgtaataaagacaaaattcactatcgtgacataagccagcagcaacagcttgctgatgatacggaatattctgagtgttgttttcatgcgtatatgattgaactattaacttccggctaaatataaaaacaaattttgtgcaatccgaaacaattacttattcatttgttttcattaagcaaatttcataaaacaaagacgacaggtttccccaccgtctttcttgatagataatggtagcagttattcctttgccgtagtgttttctaaatcgaacgtcaccgtcatttctctttccctgccaaaattatcccggacaaagaatttcagttccgaacgtctggcgcttgtcgaacggtaaaagagggtgaatatctgcctgaccggattttccgtatccagtcccggcacctctgccagcggcctcacttcccggttcacaagttttatgccttcactatcggacacttctcccttgccttccatctggatgtaacctatttcatactccgccttttcatagtccccttcacggtcaagataaaagcgtatctccaccgtttcacccgttgcaatctgcttttgcagataccatgacgagaggctgaaatcataatcctgccggatgtctatcccgtcgttacaagaattgaaggccagcgccgcaagcagtgcacctatacatttatataatacgtttttcattttttgtttctcctttctctttttattagttaataataaggcgaacgcccaatcctatctgggtatggaagttacccgcatccgttccgaagagcgccctttcctttacctgcatcagcaggataatccggtctgtcagccagacatcgaaagccgccgtcagaccgccgccataaataaagcagtcaccgtttgtcaccgccgctccgtcaggaagcagggaggttccccagttgactgtctcgaagccgcccaaaacggaaagtccgatacggaaacagacgttccggcccttgtccgacaatacgggaataaaatagccgagttcccccgtgaactgcgctttgggtattgccttattttcgtaggtgtactcctttatctgataatccagaccatacagccagcaggtacggttacggttggtatgtgtaaaggccagcgaggtgaagtagtggcgttcgccaccactcttccatgaaaggaaatgattgactccccctgttgtaaattgtacacccgtctgtcccggcaggtcacgctgcgcgtatgcttcgcccgcaaagagcgacaacatggcaactgtcagtatgaatagtattctttgcatatacattatattatatataggttattatttcagatgcagttcactgattggttttgccgccacaaggtctgtgttctctatgcggaacgactggtgacgggcaccgcccttttcgtaaacctccaccacgagcagtttgtcatccggcagggtgagcttgggcagcacgaatataccccgcaccgtggctttcccgtccaccgttatcaggcggttgtatgtccttacaggttctatgaagttctcctgcatggccgtgcgcttggctactttcttgtccaccactttgaaacggatatagtcaatgtcgaacgatatatccgaactgttgcgcagggaagtatgcaggtacagcaggtcattattgatataaagccctttgagcagtgtctgtatgccgtacttcttgcaaccgatatgcctgatgtcccttttgttcttcttatacagcgtgtacatgatacggttcaccaccagcggtgtctccccgccgagttctttcagcttcacgaacatgcggtcgcccgcaatcccgccttcgggattgtcccgtagccagtcttccatctcaatggaaagttgcgctggttcgtccttataaaccacattaaaagaatagaaacaaccgtcggcagtgataacggagaagttcgtttccccttcaaaacctttcaccgccgccttgatgcgtactacattttccgctcccgtggccttgtccgctatgatgtcgaacgagcccaaatccacatatttcacttcggaagggaaaaggatatgtacggttttctgaaaagtcacctcaatcttatgcggtgagataatctggttggtggggaaaatctttgtttccaccggttcctgcgcctttaccgacaatacggttaaaagtatgactaatgataaaataattcttgtcttcatctgattactgttttttggatattaataaaagttgataattcgctttcacggacactttcacctcacgcatctttgtggccagatattgtgatccgccgccaagcacgccccttgtcacgtccatgacgagttgttgcgaggcactgcgtgcgaacgagatgcttgttccgaaactgcccccgatattggcggcggcttccttcatggcggtacgttctgcggtattcggaacgaaaagtccggcctgcccgtctatatcgtaagccgttagttccaccggcaggatgttcccgccgctctctatggagtttactgtgactgccatccgttgcccttcgatacgcaccgtaccatatagcggagtattggcaggtacaagcacaccacccacttgcagcggttccagcaaccggaacttcagtcatgccccggtggtcactgtctggtcttcggccacgcaggcacgtatcgtattggctccggcaagctgtccgccgcccacggcagtggcaaaaccgtaattgcggggtatcgtgtcgggtaccggaggtacggccagtgacgaaaccacattctccgtggcacgtccggcagctatggcggcaggattgccggtaccggtgcccccggcaggctgtatgttcttcacctgtccgcccgtttgtccggggaaatagcgtgccgccatctcatacgacttttccatcagttccagcgggtcttgtcctttccgttcacgttccagcttttcgttaagctcctttacctgccgttccagttcgtccaccctcggactctccttcggttccttatagaacgaggtgatctgtcttgaaatctgccgctgtttttctctggactcccggatagcatccgctttcggtacatcttcttccggtttcagcccgtccgttgtgtccggtgtcagatagcccccggccacatcctgcaaggttcttaccttctcctgcctgcgtttcttcatttcttccagttcgtaagccttctgtttgtcggccatcgtctccggtgcgatagcgtcgggtatcgtcgtattgattcctgccgtcccttccaccgtttcgggtgtgtccggtttgaagagaaaccagatgaacccggcgcaaagcagggagaggaatgtcaccacgccatagaatttcagcttgtcggcaaccttgcggtttaacttcttccccttttcggatacaggttccgctttctgcgtttctttattcttttcttctttcttatcggattgtgtcattggatacattgttttttaatggttgaatactgtccgtttggggaagcgcaatcctttggagatgctgtacctcaatcggaaatttgtctgtcccgcagaaaccgcccacgatgtaggcaaggtcgatggcggcgaagagtccgagcaggtaaaggatgataatcctttgctgccggtagctcagccgttgccaccgcctgcggagttttattatatatcggtctttctccgttctgaacgagtggaagaccttttttataccgttatctttcatactgtccgatgtccctgttttcgatgatggtaaaactctctatcagaaagccctgcggattgttgtcgctccgggttacattcctcagacggcaggtggtgacaagcgacctttcggtaacgctgctcgaacggatgatgtgctgccggctataggtcttcatctcgtagggataactgttgaagttcccctgtatgctgtccaccgtcagcgtctgcgagatgtttcccgcgatcatccggttgaagtagcctttctcctgcaagttccggtagtaaccgatggcactttcatccgaaaggtaaagggcacgctggatgttgctttcaatggcgctcttgtccggtgacagggtgaaaaacagttcgtggaaacgtctgatatgttccctcgcttccacggggcggttctgctgcacatcctgcgaaagtgccagcatcagcgattttccgctgtccagtacatagattttctgccgttgcgcctcggcaaactcgtatgcctttcaggtggcaaagaccgttaccagtacgcatactcccaggaataccattccgaacagccgtagctgccggaacgatgtctcgatgttttttaatgatttgaactccatgtcttctttctgtttttttaagtgatacgtttagaacattttcttgatgcgtccggctaccgatccaccgactgccccaccgactgccgccgcaccgtttccggccattttcccggcaccgcccaccttctgcccgtaagctcccgcaccgcctgcctgaataatccatgaggacaccgtgggaacgcagaaataaccgatgatacctataatcatgaatatacaatacacactgttggatgcgtccggtatgaacgtcgggtcctgcatctgtttgatatcctgctgcaacatcagaacctgtatgcgtgaaaggatagcgccgaacaggtcgcccacgggcagccataagtaaatacagatatagcgtgacaaccatgtggtgagcgtactctggaatccgtcatagacggccagcgcaaaagagataggccccagtatggacaggacaatcaggaagaaagtcctcagcgtgtctatcagcagcgaggctgcctgaaagaagagttccagcagttcccggaaccattgcctcaccttttcccccatgtcatacaccgccttctgcccgtacatgtttatcatcgtgtccatgtcccccagcgaccagccaagctcgtctattttcttgtcaaattcctcatcactcacaaggaaagcctttgccgggtcacgcagcatcgcttcccgttccagttcgtccttctcttcctgatacttcttcatgtcgaaagtctgctgttccaccagtgaggaagtggcactgcatacgggggaaagaatcccgttgattgtccccaataccatagtggggaagaacatgatgcaaagtcccagcacgaacggcctgaaaagcgggaacacgtcaatctcttccgcccttgaaagggactgccacactcggtaggccacatagaacagggcaccgataccggccactccctttgccacactggccatatcctcgcacagcggcatcatttcatcgtaaagcgaacgcagcaactcatgcaggttcgtccaatctattgatagtaatatcatagtttatctgtttttttaggatgaatgattaccagtaacgctggtcgtgtgtcccgtacagggcaagcacccgctgggaatcccccttcttcttgctgcgcaggtacgatatgccgatgttctttcgggtatagtaccatgtcaggttcttgtattccagcacttcgccgtatatccggttgatgatgtccagtcgttccttgtcggtcatcgagagtccggtagccgtagtcacttccttcaagtccagcagcaggttgctgctttcttcaagcaaccggttatacccgaaagcaatggccgagagttcttccacggtgaagttcgggtcgcccatcatcgtattgaaattggtcacgtaaatatcgctgatgtcacctacgagcaggatagtctgttgtaccttgcgtgccccttttacgaggtcgtgtacggatttcaaagcgtcgtagtaggcctttccctgctggtaaatctttacagtctcctgaaagttacttcacatgttctgtgccgttgtggaagtctgtacaatttcattggccgagtttacaatgccttgagcaaggttcgtagggtctatcactgcccattgtgccttgactgtcaccgaaagggacagcagtaccatgaataaaattatcattctctttttcatgcgtctatctcctttctttagtaagtaaataccgactgtcgtcatcacgggcaaacagcccgtaacagccgaacagcaacacctcgcttccgctgaaatacccgatacatccggcatccttgttcccgtgcaggaaaaggtcgtcacctttccggagcgggatattgatttcggtataactcatttctccggcgaacagcgtggccttgtatcccttgaatccgtccgtcacatggttggatttacggattgtcagcgtggagccgccttccttgttcattcagtgaccgcagatgcggtcattttccagttccttcttcatttccccgatcaggttcagcaaatccagattggtcagggtcgcatctccgagtgcttccctgcattggcttaataaatctttcttactcattgtcttctatagattaatatggttacttgttttcctgccgtttgctttcggcaagttgtttgatagccagttcgatgtttccgcccagcttttccgtaaggcgggtaagttccagtttctcagtctcttcggtggtgtagcaaaggtactcttcagccgaaacttctgttgcatataccgcactttgcgtaccgccaagccctatccagacctctttataaaggcggttcgctgcattggcaagattgatggaaagtatctggctgcgttccttgtccgtcaggccgagcaggttctgtatttggtcgaacttgttttgatacttccgctggtcgagcagtattttgcagtcactgttgttgataatcgtctctttcacaacgggggaagagataatatcatccacttcctgcgtcactacaaccgcctctccgtaaaactttctgactgttttaaaaagataacggatgtagtttgccataccttccttggcgattgccttccaagcttcctcaatcagtatcatcttgcggataccttgcaaacgtctcattttatttataaacgtctccatgataatgatggtgacaaccggaaagaggattggattatccttcacaacatccaactcaaatacaataaaccgtttgttcagtaaatccagttccttgtccgagttcagcagatacccgtattcaccgttcttataataaggttccagcacgttcagaaaaccgtccacatcaaagtccttctcccgcacgttcttgtccgccagcactttgcggtagtccttccttacaaagtcatagaacgagttgaagttcggctttatcttccggttcttctttatcttttcgatatacaggctgactgcattcgagagcgccacctcttccgaacgtcggggcggttcgtcctcccttttccaaagggtgagtatcagtgtcttgatgctgtcccgcttttcgatgtcatactggtaatcctccgtgaaaaacggattgaaagaaatcggatcattttctttgtatgtaaaataaatcccgtcatcccctccggtcttctgatgtatcaggtcacagagtcccttatatgaatttccggtgtccaccagcaggatatgcgtcccttgttcccagtactgtctcacaagatggttggtaaagaaactcttcccgctgccgctggggccgagtatgaacttgtttctgttggtcaccaccccttttttcatgggtaaatccgatatgtcgaggaagacgggctttcccgtcagcctgtccaccatgcggatgccgaagggagagagcgagttccggtaacaggtttcagccgtgaagaaacagagcgcctgcccggtaaacgtgtagaacgtctcttcggccggaaagtccgcttcatttcccggtatgcctgcccaatagagagccggaaggtcggtcgtgttatggtgcggagtacattccatcaatgccagtgcgcttcccacgtcattcttcaccctgcggagttcgtccccgttttccgcccatgcgacgatgttgcaatggcagcgcacggattgcagtccgttgctgtgcgcctcattcagatattcgtccagccactccttgttgatctggttgctgcggctgtaccgggaaagcgactgcatgttcttcgccatcttctcgaaacgggaaaggttttcgttactgtcgtctataaatatccactggttgtagatatggtcgcaggacagcatcacgcccacaggggcggcatagctaagacggcagtccgagcgatctgtcgagaggcgttcgtaccgaccgtccgtccttacctttcccggcaggtcgtcgaggtcggagagcgtatgcaggcaaagccgcttgtcaccgatacgcatctcgtcagggttcagttgcatatcctgcaacatggtagttccgtcagccgagagcgtgaggtatctctcgataatgcccggttcgttttccgttcccgtaatctcttccgtggtgagccgttccagcctgacaaggccgctgtcattaacgatactttcaaactgtcccaccgcttccatgaagcgttccaccgtttccttgtccctgatttccttcggcaccagaaaaccacggcagagcgtgttccagttgctttgctgccgggagcgttccctggtggtcttggtgaggaacaggtaacaggtgtggtgcaggtagggacgctcgttgaaatggcgttcaaaactgcgggagaggaagctgaggtcatccttccggctgtccggctcgtatttctcggtgatgaaaatatcctgtttgtgcaggattgaatagttcggcaacaccttgattgccttcgctcatgtggcgtgcatcgcctcatactctgcggaggataccgaaaacacttccggcagtgtgacccggaaagcgaccgtgatgtcggcgtccttgctgacaatgcagtcgtgttccaccgccatgatggggaacttgctttccaatgtggatgcttttaatatacttctcataatttacgattgttgtttgttaatcagacgtgtgatacgttttcgtgagaggattctccggggatgcctccgggccgcgaacagcttcatcagcccgtgacttccgtatttacggttcagcgtgaaggtcagccataccaacaccgtagccgacgataccccgaaatcgatgcagatccactgtccgatgcctgccatatacatgatgacgaacatcacgaacacggcaagcaggccggcagcgaaaataaacaggtattgtgcccgaagccccttaaattcaacctcacggcccacacctttatttatctcaaaatcagccataagttactgtcttcagtatgaatcttagaggaagaacgacctcagaatggtggcggcgactatcagaaagatacaggctccgaaccacgaactggcagttttactcgtgtcggggtcgcccgaactgaacttctggtagactttgacgccgccaacgagaccgattacggcaccgattgcataaatcaattttgttcccggatcgaaataacttgtcaccatctgggtggcctccgtaatacctgcctgcccgtttccctgggccattgccgcacttgccgccgcaacagcggcaagcatcataatcaatcttttctttttcatttatttccgtgattttttaggtgattaaaaaagccacggactgccccctttcactatccccataaggcagccgtggccgtttatggtttactgattcagggggtaagttccggccggaaatcagccggagtcataatatgctatttgcattgtcacttgatttggtggtgaaacattcttgttaattctctcttgaaagcaggatgtgaatcatcccgaatcgtaataaccgtttgttctcattgtctctattgtgtcttgtctttatcaggttatttcagatattctccgcacttgaaacccttgcggggtgtatagtcttcaaaggaggtagacttgaatagccacatccggttcgcccatcgggcaaggtcacgctcgtattgcgtaggcgtccgcttgtttgcataatcccggaaagggataacaaagggagtaatccccagttccctcagtacgttcaacctgaacaaatcctgctcaacggtcgaattgaatcctatcagcacgtagcaggttatcttgtaaggtttcacatgcctgaccatctctttcaggcggtcggtcagatccagccggggcaaatcccacgcaatatggatgttctgcttcatcttcatccggtttagatgccaggcctgttcctcattcataatcctcacatccacaccgtgcagtttaacgggttgccgggccttcatcaaataatctaccgccgatcttcactgcggattggcaaagaaattgttatccagcacctcaatccatttccctttcgggttcagctccaccggctccacggcctgaatgtatccttccttctcacggacgagacagaaggggcatttacggatgcagccccttgaaaagaactgaagggaaaaaggatattgggggtaaatggaataatccatcatccggctgttttccacagcttcgggaagcctgccggcaatatcatatcccgttccgccctttatgatttccttcgcatccagcagattgtaatcatagtcagaactaaaagtgaacactttgcttgccagcaccttatcataccgtcccgtcggttctgcccattccacccgatgcccttttgccttgtaataagctgaaaggcgcatcagcgcaaaattggggaagttatgtccgtccacatctaccagtcctatattcatacggataaaatttaatggtgaatagttcttgttgccttaccgggtgaatgccgcaggcggtctgtcatcccgaatcgtaatagccttttgtcatagccattctgttttataagtaagttaccaaaggtattgtctcttcttgattggagtgttcccttaccaggcgggaacatccatttatcaacccgaatcgaaataagtcatatacatggttttgttggtttattcagtcattaataccatagcgaatttctctctttaaggtgatacgggctgtcaacccgtatcaaaataacctcttgtcattgttacctccttttttaattggttaatctctgtccggagcagccccgcccatttgctcggcttcatccagaaatttgctgatacggctgtcgctgccattgatactttccagtatcgagcgttcaatctgcgtatctttgatatggtggatcgcccttaaaagggacaatcgtttgtctgtcggaatatccttgccgttgcagaggtcgataatcaggtcaatctcttccggccctatgccggttgcctcgcccgaatactcttcgcggatacagttcaaatcatccagttcctcgttcaactcatccgtatccacttcgtcaccgtttcctccctgtccgctatcgccatccggcttgccggaactctcatccgaagaagccctccactcttccacgcgcttgtcccggaacagttccggaatgcgctccggcggcacttgtgctaccttttgtggcgctgtatcttcgtttctgccagcaaaagtagaggcattttctttacctgcaatagttccggaaccggtgacgtttattggcggccgttgacgtatcccgtagctttttgtaacgacaagactgtccgtttcagagcgtttttggggaggtttttccatgttcctgccctctgccttttccttgacttcagccttttctttgtccttcacttccgtttttgcggtcgtgacattcctcttttcagactccggcgctaccagaacgtctttcttttccgctttccctttcgagcgcctgcgcccttttttctgttcctctttcaccggatcgaaccatccggcaacgccccgcagagcttttgccatgcggcggcgtgcctttccgaaacatatttcgccaagctgtcccttgaacaggaacttatccatgaacagataggcgaacaatagccagaacagagcgattccggcttcatagtaacctgattgtatattcataccctaaaatattttgttataactcttttgtaaataggtcttcacctcatccgcatgtttctcgaaatgctccttcaatacattgtctatgtagtttcctaccgtcaactgccgttttccggcaatgcccacgatgactgatattttctggtgcagttccttgtctatatataccccctgtctgccttcacatttataaggggtgaggaatctgcgtataaagtcagccagagccgtgcgaatcgttttcggtgacgttttttccgtaaccacttccgaacggtcggcaccacctgcatcggaaacatccctgactgtttcatttgcagtgccatccgcttttcctttctcatcggataaagcggtttctctattttcgccattacctccgccggttgaaggtacagatgataaaggaggctccgaaggaacccctgccatcaggctgcgcaggtacgcttcatccaccggattttgtccgcttgttttctttgccatgactattcggttttaagtacagatatgatttcatccataaacgtatcgaagccgcactctttggtgaatgccgcatcgggagagaacagcgtactccggtaaacggggccgcccatagcggacaagtccttggtaaagttactgcgcacgggaatacgtgttttgagacaatccagccctaacagggaaaaaccttgctgatacacatcatacaatgtcgtgcgttccctgcggtcaaccatgttccagaatagatgaagacctttcagtgcggacacgccggtctttatcagccggtcattaatggtggtggcaaagttcagcgtgctttccagcacaagacggtctgcctttatcggcacgaacagataatcgagcgcactaattgcagcgataaccccgtcgctacccatagttccgggcaggtcgaacagtaccatgtcataatgtatgtccgatttcccttcaaatctccttcagtcagtcatacaatccggcggggtacttccaatgaccggataagcctttttcttcaaccgcccggtctgctccaccaagaggttctgataaacgggtgtggtcttcaccacttccatatcccgctttttctgtttcataatagaatgttgcggatagtcgcaatccactaccgctacgctgagaccttttacataatgcagtcatgatgccgcataaatcgtaaacgtcgatttacctacgccccctttctgggaagcgaacgaaatgaataccgtttcctttcttttttccatcgttgcctaatttaagtgaataattttatttataattcagcagatagacatctatccacttatccgttcagtcatttcactatccgtttagctttatacttacatagctatgcaattatatagctatttatctattcagctatgtagctacatagctatctggctgtctatctaagtatttagctaatagtatatttacctctccatttatccgaatatacacttgcctgtctatacatctttgtatatagttgtgcaagtaaatagatagccttatgaatgcttatctgaaaacttgcttaattaaatgcctgtttagtcagaaagctattcggatagttatcctgataactacctttttatctatccaaataagtaactgaatagctatccggctgcaaataaacctcaaaaagagcatccgtgacataaccgtggtttcaaagtcatttattggcagctgttggcgtaacgcctgataatacccataccgaaaaaactatctacctttgtcgccgggagagcgcagcccgttctcgaaaagagaacgttaaacaaatcctttagacctttaatccggcacagccggattttaatatgcgtcagcatatagcgaggtgtactttcagcggttgaaaatatttccaaccgctgaaagtctcgcccgaaaggtgtttcgggggcaaaggttctcccaagtcgaaccttttaaaattttcatgttatgaaagatgaaacaagaatccgtggcgccgcagggcgcaaggtgctggcagacccgcgcacgcaccgctattacctctgtcttaatgacgaggaagacgaaaagtttatctccatgttcgagcagtccggcatgaagaataaggccgaatttatctttgcccgtatcttcggttgagagttcaaggtagtgaaaattgataaagaagcacaggaatattacgcccagcttaccgccttctatcagcagttccgaagaataggaaacaactacaaccaatgtgtaaaaaccatccataccatttacggggagaagaaatcgcttgcgtttctctacaaacttgccgaagaaacccgtaaactggaagaagtatgcaagcaggtcatcgaactgacaaagcggtacgaaaaggagtatctcactaaaaaggaataacatcatggtgccgaatatcacatcgggcagttcattctatggagtgattgcctacaataagataaaggtggatgacggtacggcaaaggtattgtgacatccgaaaattgcagccgatacttcgggcaatgtgccgattgaaaactgcgtgcaggcttttgaaccttatatcgcactcaactcgcacgtcaggaaatcggttatccatatttcattgaatccgtctcccaaagacattctttcggaagaacaaatgatcgtactggcgcaggagtttatggaaaagttcggttacgggaaccagccttatatcgtatggctgcatgaagacatagaccgcaagcacatgcacattgtttcggtgcgcatcaacgagaaaggagaaaagatagaccacaatcgtgaggctatccgggcacagaatatctgtcgggatatggaagtgaagtatgggcttcatcccacactcggagaacacggtgagcgggaattgttggccttgcaaaaagtggattatccgaaaggtgacgtgaaaacgcaggtaaagcataccgcccgaactttgctggaatgttacaactgtcattcacttgccgaatacaacacccttctgaacttgtataacatgaccgcttatgaagtcaggggaagtgtggacggaaaggaataccacggcatcatgtacggagctttggatgataacggacagcagataggcacacctttcaaatccagcaagttcggaaaggcattcggctatgaagcactgcaaaagatgtttaccgcttctactgaaaaggtgaaaaagaataaccttaccgaaagggcacggcagaaaatcatcaaagccatgcagaatatcggtacgaaagaagattttgccagcaggctgaaagaggctgatatagaagtcgtttaccgtatcaatcccgaaggacgtttgtatggcatcaccttcatagaccataccacccggacggtgttcaacggctctcgtctgggcaaagtcttttcagccaatgtgtttaacgaattgttcaacaacccggatgcagaccgtgaaagacttataccgcaaccggagaaggaaccgtcccggcagggaagggaagcgaaagcggaagaaaggcaggaaggggtagaataccggcaacaggaaaatcaaagccaacatcaaagtgaatcttccgacagtctgattgatatatccgcactcggtgccgttgatattttctccatactcatggaagacgaccatacgcacgagtacattgatccggctttccgttatgggcgcaggaaaaagaagaagcgcaggcgcaggttataatataataatgtatagaaccaagaagtttaattttaatagttacaattatgcagaatgaagatgatttaagaggtcttgccaaagtcacagactttatgcgggccattagttttttatttttggcgatacacatttattggttttgttacggctggctccacgaaatgggctgaacgctcgatatagtaaataagatactatccaatttccaacgcaccaccgggctgttttcatccttgctttacacaaagttgttttgtgtcctttttctcggtctgtcctgcatgggcaacaagggagtgaagaaacatgaaatcacatgaaggcagattatcattgcggcgattgcgggtaccatactcgttttcctgaactggtggttgttatccattagtgcatcatccggtgtgtgtgcggtactttataccacaacactgacctgtggtttcttctgtctgctggcatccggtttatggataagtcgtttgttgaagaacaacttgttggaggatgttttcaaccgggaaaatgaatccttcatgcaggaaataaaactcatggaaaacgagtattccgtcaatctgccgacgaagttctggtataaaggcaaagaatggaaaggttggattaatgtagtgaatccgttccgggcaagcatgattttgggtacaccgggtagcggtaagtcgtatgccgtagtcaacaattatataaagcaggcaattgagaagtcctatgcactctacatatacgattttaagtttgatgacctgtcagttattgcttataaccatctgattaagtatagacaccgttataagataccacctaaattttatgtaatcaacttcgataatccaagaaaaagtcaccgctgtaatccgttggctcccgaattgatgactgatatttcggatgcgtatgaatccagttataccatcatgttgaacctcaataaaagttgggtacaaaaacagggagatttctttgtagaatctccaattgtattgtttacggccataatttggtttttgaaaatctatgaaggtggcaagttctgtacgttcccacatgctattgaattgcttaataaaaggtatgaagacgtctttactattctgacaagttaccctgatttggaaaactatctaagtccgtttattgacgcatggaaagggggagcgagtgagcagctccagggccagattgcaagtgctaaaatcccgttatccagactgataagtccgcaactctattgggtaatgtccggcagtgactttacgctggatattaataatccccaagaaccgaaagtattatgtgtgggcaacaatcccgatagaatttcaatctatggagcagcattgggtctttataattcgagaatcgttaaactaataaataagaagaagcaactcaaaagttgtgtaattattgacgaattacccacgattttctttaaaggtttggacaatctgattgccacggcacgaagcaacaaagtggcggttgtgttaggttttcaggatttcagccagttaaagcgcgattacggagacaaggaggccgccgtaatcatgtcaactgtgggcaatgtttttagcggtcaagtggtgggtgaaacagctaaaacattgtcggaaagattcgggaaaatcctacaaaaaagagagtctatgagcatcaatcgcaatgatacatcaacttccatcaacacgcaactggacagtctgatacctgccagcaaaatcagtacgttatcgcaaggtatgtttgtcggtgccgtagcagataacttcggagagacaatagaacagaaaattttccatgcgcagatagttgttgacaatgaagctgtacagaaagagacggcggcctaccaacccatacccgaaatcagcagctttctggacgagaacggcaatgatacaatggaacagcaaatacaggccaattatcggcaaatcaaacaggatattgtcgaactggtggaaaacgaattgcttcgcatagagaatgatccggaactcaaatatctgttaggggaaagttaaaattatcgctcatatcagaataagagcatgatgattggggaattaaccagctcatgctcttatttattttctaataagttttacccttcctttccaatatatattcttattttcagttttgaatataattatatagtcaaaattaaattatttatttcttccaaattttaattagttctttattcaattctttgtcaggggtaaaatctttaatgaagtttacgtcaagatatgaattcttgatacgtttcacaattgccttacgtaattttttacatctatcccagtcaagccatatagggagttcttccgtatatggtgaaatatatttccaaatatcataatctaatcgcccttctgaagcagctttgtgaagtggataaaaggctatacgcatgaattctatagcatgattatcataaggccaattaaatgatagtaaatataaataggcatagtattcaataggcattgattttattgagagtttactaaaagctatccagcgcccactaccttttgattgtacttgcacagaaattggtagaatagacttcattataagtaaaccgacattgggtgtcaatacattcatcgtttccatccaggttagtatttttgagttttcctgttggcatagcttttcaatagattttggaactacatgttcggctgagtcatttagatagtcaagtacataataaacagcatctttatccttctgaaaaataagattactcaaatctgcatacactctgatttgtgtattaagaattttaaagagtaattctttccattttataaatacacttgatgcatgtgaagtgagaataatacgaagtatatcttctatttgattatatgaatatgtaatccaactaccctgatttagtaattcaggacaagctgaagctaacgattggaataatgaccaatcattatccgctataacattgaggtctgatattgtgagatactcattactttttgcaagaatactttcaccccaatcattaagttgggatgcttgacaaagtttctgaagcaattgataatataattggcgattatcattgtgtgctatttcatcaaatctttgccaaaaattaatgtaatgtactgaaaaggaatcaatgaattcacttacacacatatagtataaaaattcatattcaggtacaaacttatcagtcattcgtttttgaagaaaacgctctttcaaaagttttccatcttcacgatgtggaaatagggtagcaagttctgcaataatgagttgtattgctttttgtttttcttcgttagcttcgtaattcttattgataagttctactaaaattaagaatccattgagatgttgactgtcggagcctatatcatctgcaaatgtatggagaagacgacttaactggagtttttctaacgcaatatcttgagtagccaatttaatccatgatggaatggcgttaagttcagattcatcgtaaacaataattgatttaacaatatcatgttgggtattgataaattgcaaaaagaatggtttaccatataatgtccgaagtcctgaactacctgagcaaaatgataattgacaaagtatttgatacggaaaataattcatcaacagtaaacaaaaatattgataaaaccgtgatttgttttctatactgaagacctgcggatgccgattaagaagttcattatatataattggcaatgatggaataataagcttattggtaaataatgaactctcatattctaaagtagactcaacctgaagaggtgttgcataaaactcataatttccgttctgtggacgtataaacatatctataaaaactcgataatcagctatttgtgacaactgatgaaatgaaatcagaaggctgtgagtccaaacacatccaggacgtttcatttcgttagcataccatgtcttggaaattacatagtattcactatttttgagtggatatatagtaatatagtcggcttcatcttgtggattgatatactctgaccaatcgcttaatgttgccatgcaatccatatcctcgcttgagggtagtacaatagaaccttggatcaaattatgaccttggttgtatccatgcaacatttgatgaatttgtattttcatttttactgagttattaaaaaatcaaatggttctgtaatgtcatgagacttattatcagtataaacataagcccgttgcttaagttctgtaagtcgttgatattcgtcaaacttttcgtctttatactctaatccttgagcactgacaccgtaatatttcacattagtgaaatgatgccgaataaagttataaagaaacgggtgtttagactcaatccatgattcaataggaaggtttgtattcaccttatcccatgcagagatacaaatagctaaaggaatattgtgatctacttgagtatgaagatatttaagcaacataatattttgtgtccactcagaaatatcttcaatttgcatagtcgtagattcagttcgagcaaattctgtttgaacgggttctatagattctgatgtttgggggatttcgtcttgcaatatgtcttcttttgcatatttaatgaaatatagaatacaatctgtttccccacaccattgaactgccttctctatcacattattagaaagtatgcgttgaaagacttcacctttaaaatctggaatgtgaagttcaagggcatttcccgtagtttcagaatgaagttttaaatgaatttcttgtggttctatatttacagtccggctaacgaccgtttgttccaaccaacttttcttcagagcatctaagtaagtggtatcagaaggatattctttacaagtaagcttatgacctgtgccaccatctttctctatagcccaaaaagctccgatataagtagattttcctgcatttggaagacctacgataagacatttctttgtattttccatcatgctttattatttttaattgatgttttaacccaatctaaagctgaatctactttttttgaatcaagcggtcgtataagcatgcagaacaacttctcaagttctacattaccatcaagatttttagaattgatacagtgttgggggatatcctttacttcaaacatgtcctcaattagctcaacaatctcttgcttatgttctttgaatttttgattttcaatatctacaactttatcgtatttattaaagataatatattttgttgcgaataatggtaacatgtctttctctttaagcctacgaagaagagttttgagttcatctttcatatttgaataagaacgtccaaccaattcctctgcattaataaagagtaaaatgcgatcagcatatttgatagttttatctttaagaagttcttcatccttggatatatagtcacgatagcgttctccggctctatcagataacacaataagacgtttttcattagtggtttcatgttccatatgaagagtaagaaatggattttcagaacgaagggtacgattagtatttgatcgaccatctttactacatttacgtagaaaaactctgcgctcaaagcctgcaaaggtgtcggaattgacaaacttataattagccattttgccactgactctaagcaaatgatataatgaaccgacaaatgtggtcttacccaaatcattaagtccaaataggactataagttcaggtttttgattagtgataatattattaatatttacctcatttagagcgtcagtataaaatggagtttccttcatcgctgccaactgttcaataatattttcttttgtaggactttttgcttctttagggttatctaaaagaagctcatttgtatcttgattatccatgttaatctgttattaattcctcaaggaaaagttcgtaatacatataaattgcaaattcaaggtctgataatggtaattcacctatttcatcagtcaagttggagtctttaatgtaatttagaagaagtgacgactttgaatcagactcatagctaatataccattcagagtctttcaattttggtttaatattcttcaattttgcatttttacgacttgaaggaagaatgttcataagtgtttttacaggattagaatcaacatacttccactggggctcaacggcaagcatatttgcagcataatatgccaaaacaaatgggtcttcaatacttttggattttatatcacagattaactcttgatacttcaacattgctgcttgttgtgctaactgttttatttcactaaaattatcttcatcaagtgttacgtccatatcttcgaaactgtcatattcaaagatatctggaactatttgtgtatcagaacactcttctatatgattttcattctttctatatgaatcagaaaatggatacattggagttataaatgctggtgcaagaagcttattatacgaattcttgcgaataaccatcatattacgtactattaatgaatatatcattctatctgtattattatactctttatctgtatctataatcaaaatatacactacatattcagataagattttataaacagcaggaggtaactttatattctcattaaactgctctcgatattgtttcatgatatatgagcgtaaagtagtattttgtgttccacatataaaagcagaaacgcaatcttctactttatggcgatcggcagtttttgcataactcttaccaagagacgcaagttttgatgtcaaatccttttggaaaggaatgactaatacgctattaagcattttttctaacacagcatccatattacttgtttaattcgtttaataattgttggtaaagacctttttctttgactgcttttaaaaatatgaggcaattagcacgatctgaccttttgtcatcataagtttccggcaagagtttctcaataatttctctttgattgtcactattgatgaacatgtaattgatttcattaattggtatcataatatcttctattgctattggatctttttttgcttcttcttgtgcaatttctgaccaattatcgggagaagctaaagatacagacattgttttagattcttctacatatttaatgaaataagctccgtcccatttacgagattcaagttttacagtcataatagcgtcttccacactaagttctataacattataaacaggaggacaatccattatatctgcctcttggtcaggctgaaaagctccggaaaatattttaatagttttgtcattttgagaactttggatatgcatatgaccaaaaaactgtaatttaaaacggtcatcaaatatcttacaaacatgattttcatctatgagccaatctaaaggatgatgtatcatcgaaatgtttatctcattagagtatgcttgaatattataagcaggtctgggaaggaatgtgagatgattgtcctcttttaaatcttttttcgctctttctttaccatcacatgtaagagtactatttagaccatacaaattaactttataatcgccttctttacctaagctaaatttccaataataattcttgttgtcgaaacaaagctcatccatatcatcaatcataatagtttcactcacttcatcaatgaaatatggttgtgcaaactcattataggcagataaaggagcataaagtatttttagcgtatcaggctctgtatgcttgattgtctgtaaaaaaatattgttatttttcttatccaataataaaggtcttaacagattacgtgttacttcatagctttttctgttaatatcatgattacctggaactacaaaaacattaggtcttttcccatttacttcaagaacattacttaccgtatctataaattctttagctttgttaaattcctccttttgtcctttacaagcaatgtctccacaaattaaaacatagtcaatggttccaaattgttgctttacgttctccaagtcttcaataaaacgtatacgcatttgcgcataatcatcttcagtctcttcgcaaaagaggaaatgtatgtcggaaaattgtaaaaatcgtatcatatctttaaattctttatgagtccatatgaaagaactttatcagcattccatatttttcctgccttcatatacttagtcgccatttttttctttactataagtacttcaggaatatgcattttttctcttatacaaaggtaatgagatttattgatatgtgaaaatttgttttcagaaaattgtagattatgtttttgaagcaaacaataatctttgaagaggattatacttacggacaactcccgccaatctccgccatccattactgctggtagaaaaactataatatgttatcagttaaagctctacattcgcaccgacgggctaaagtttacccggtattgattaattattgtatcatttaaattattgattttatggctaagaaaaagcaagaacaacaagaacagagtcaggacgagcatgtaatggccatccttgacaagcgaacgaacaaaaccgcagtcgtttccaaaatgaacgagcaggacggcagtctcgaaatcgtgccacccgacaagaagaatagcagcagtttcctcaaactggatcgtacctcaccgctggaactattcttcaccaatttcaagaaccagtacgaaaatcccacgagtttcagttttttccttgtacctcttgtccttttggaaaagacactgaatgccgtagtccaaatccgaaaaggggaagaccccggagtagaaggtaaaaaactggtggagaacagcgaactcaacgatgaaggacgtatcgccaaacttgcccgtcggtataagtttgacgaacaccagcttccgtggaaagaacttgccgcattgggagttgacaagcaactcttgtttgataaccactgcatgggtgagatgctaaaaggaaggattacctctatggctttccccatcagtaaggaagtgaatggtgaaaagaaggatatgggggaagcctgtttcctctgtgtcaaaggggaggacggcaaggtgcaactgaaaactttaagcagacttgacaaaccgcagtatgacctgcctgcctataaaggagtattcacggacgaggaaaagcagtcgcttaaagacaccggaactttgggggcagtcaaggagatgaaggatacccatacgggaaccgtctgtaactgttatgtatctttccatgaaccgagcaaccgtatcattaccatgcccgtggatgccatcaagatacccgattatatctacgggaaaaggttggatgacaaacagaagcaaatccttgcgtcaggaggccagcttcccatcaacgacatacagcgcaaaaacgatacgctgctttccggagttgctttcgtcgatccgagaataatggacatcgcattcaagcagtctggtgaacaactgaaggtcaacgacactatcatgggtgccaaaatcacgcctgagcaaaagaagatgctccagaaccatgaaatggtgttcgttgagaatatgcgctacaaaggcagggtattttccgatgatgtacgtttcagcaacaagagcaaccaactgctgataggacgcaatgcccgtgaatacaaaccgaagttggatgaaccgaaaaagggcaaacaacaagagaccaggcagacaccccggcatgctactgccttcaggcctaaaggcaagaaaaatagtttttctgtcgcatagccgacagggaaccggcttactctattatatacccgattgtcgttatggatgtcgggtatatatttaatgtatcatctaataacttaataattatggaattgaaaaaacaaaagaatacccaaccttctccggggtattccgaatataaatccttttataaatcagtcggaggaaatgaaggagaaaaatgtaattatccgacacgtttagacctttatgggaaaggctgttatcatgattgttcctattgctatgcaaaatccttgttgaattttcgcaaactatgagatgcggaacatccggcagtcgcggatattgacaaggtgttaaaagttatccgtaaaattccatccggttccattgtcaggcttggaggtatgactgattgtcttcagcccattgaaagccgctgtcacataacctatgaggctataaaagaactgaacaaacaaggtatcggctatctgatagtcaccaagtcatcaatggtggcggatgataaatatatcagattaatggataaaaaacttgcacatatccaaatatccataacaacgatggacgatgacctgtcacggacatatgaaagggcctgcgtgccgtcacaaagaataaatgcgcttgaaaaattacagcaatgtaattttgacgtatctttaagattatcaccttttattccgcaatacatagatttcaagaaattgaatacaatcaaatgtgacaaaatattagtagaatttctacgagtgaatacctgaataaaacaatggttcaatattgactattcagaatatactttcaaacaaagtggttatcagcacctgccgcttgaactgaagattaaatacctcggacaaatcagcggatttaagcagttgactgtttgtgaagatgtgacggaacattacgaatactggaaaaacaaaataaatccgaatccccttgattgttgcaatctcagcaaaagataaccttaatataggtatgtttcccacggcacattgctgtaacccccggaagctacgcaagctccacttccgcaggttacagcaaagagccgcttttcaggaaaggacaaaggcacggccggcgcccggataaatccgaccttgccggccgtacccttgtctgtcagccgcaaatcacatcattcctcttcctcgaaggaaaggctttccacctgcctgttgattaccttccagtcaatcgagtctttcaggttgataatgtccacaatcgaataatgctttgtcccgttctcttcttctgcaaaacgtagccttccgctcaaacgctgtttctcaatctctgccggatcgagatttatcagttcgcagacttcatcgggcagcatggaaagcgccacgtcattttcctggcagatatgttgcaggatggcaaacatgttcaacgacttcttataacttctcacgagtgcagcgaaagaaccgctttcaattttaatcatcttcttcataacgcttattttttagagtattcttctttttccagcagcatggcacggagtacatctgaacggcggtaatatatcttccccttgtctctgtgaaaggggagtgtcccgtcattgcgtcgtcttaaaagtgtcctgtccgacatcttggtgagcaggcgcacgccttttgaatccagtatctcactgtcaggcaaattatgtacggcaggagccaataacttttcaatgttggtaactttggcaagtatggcactaagcatgtgggttgtctgtccacccggtgcagttcttctgttattcataatgaccttatttttattgtttatggtgcaatattacggagatattataaggccattggttactcaaccgttgagcaaccgccaaaaaaagacagaaaacgccaatttgggacaaaaaatagccaggagatactattcccggctatccaataataaataggcatcaataaattacaccttaaattcttaatatattaataatcagatttatacaaaaataaatagcagtatattttgctatattccaaatattgcctacatttgtacatgagttatttgaaactatgcaaagcagtgtaacccgaagcaggacttccatatccaaattgttacctgcatcttttaaactctctatatttaatttatcttcagagagttacatcaaaatatattgtttcattacttgaaactagactttctaagcgtaacaacaatttctacatataaaaactatacttaatttgaggtttttgttccggcgacacatatttcaatatttctccaacattccgactacaatcaattgtaatcggaaattttctatcaaattgagtgttattccaattcatttttgtaagagataatatttctctacatatttgttcaggagattcatcaaaagaaaaaagccttacttctataggattaggaatatatttacctggatacgtcccataatactcaacatatcctctagtatataaaaaatgacggcatctatcaagactaaacattgttcctcttaatggaggataatcattatctctatataatctaaaacttgttggcatgatagttactaaatctattgaattaatattcatatcataagcaacccttttaaaaccatcaatttcttcttcggaataattcgaactcttatgaataacaagcctttgaggaaagatttttattgcattataatattcactcaaggattcctttaaaagattatatgcttgttcctccgtcaaatgaggttgcctatcctttttatcctcttttacaggggtccctcttaatattactccattaccgtgttcattaaaaatctgtgcaacactggtctgaatagttttcttatcacgggtacgataaaaacttattcctgcaaaacaagttatattattagtttccttttttaaagaccaaggaatacctcctgccttataatataaggcagtataaaagttccaagctatacttgcttcatcttgcatctcagaagaaggtttagctattctatctcttattatttgaattgggatattatattccatagctttggcttttagcaatctcctaaaattaaactcaacttccacagaatcctcctctccaaaatcatcatctatttcaaaagttttagtcccatatattatttttgtcaaagattcatccaatacacataaaataacatctggcttcttattgtttgcaagaaaatgtatttctgacaaataaagctccactgttttaagaattagctgatcaatatcattagcttcttttttaattctgtcaagggtcgaattattaattttacgtatatacgattcatcatatacaattttgctatgaaatccgattgtttcattaaatcctggaaaattagtaaaaagattaggttgcttactcttttttgcttcaatatgattaccacattttttaatccagctaatagcaatattaatactttcactcaatcctataaacccaacaactattttatcaggtcttatatcattaatatctgatacattatacttatatatacctgtccgaggacaaacatattcccccttaccaaactgtaataaaggttcatctagtaatttaatttccatacaatggagtataattaagtgttaaattaaaaggagaagaaaatgatatatacttatattcagcttcattatcttctaatttatttgtaagacagtatgacaaaaacataaaatgttggtaaacagaagaattactttccaagttttttttctgagcaattaattgactttcttgtttacagctatgatatccatcataagtaaaactccatcccggagttatacttataaaccatttttcatttgatctaaaagattgaattttaaatgagagttgcctaaaatataaaatttgcttcttttcgctattccaaacttcagcaataacagaacgcgttgccatttttttatttttccacgtaatttttcgttccctaggtacccctataggcttaaatctaaagtatttttcttttggcaaccactggatattcttgtatgaagccaactcttctatagaacgatttataagatgaagcagtgcttcttcgtacttgaaactaacattgacaaattcatttacagaatactcttcaaccgtaccaatttccactaacttatttaaaggatcatcccgattatccaagggcctaaatgataaaattttatcttcaaaagtaaaccaatctctgcaatatgtgattttcaatagttcaaacgccttacttaacaccttacccatagatgcactctttctaagtttattgggagtactccaagattgcgtaattatatcatcccgatctaccccaattatgcctacatatacttttgaagggatatttacttcaagtatattcggaaatagcacttctgtttttattatctctctatgttctaatagatatcttcgtttacttatttcctcttcacaaaactcatttttcaataattgtaataaagaatctattttagcaatactaattaaagagtttacttctttaagaatatcgctataatctaaaatatctttttccgaaaattctaattcattatcataagctacagagaaaatagcatctgaatactttttctgcttctctgttatgatatatataagtaatctatcataatcctcgcaacgtttcccttttacaaattcatttattgtatgtttgactttgtccccagtagcagtagatgtaacttgaaccgctattctattttctgtatccactagatctatagcagcagaattcctcactttattatttatattaactaaatttactccataaaccaaattaaaaataggaataatcacattttctgcatgaacattgatatcatacaaatttagactatttaaactttcgacctcagttctaaatcttgcaaatagttctgctattttttctattttttcttttctatgcatataattacattttacatattttcaaaggtacacaaaaaaaatatttctataaactttctcttaaattattatgaataaaattagatatcagaatatcgccttattaataatttaatacatcatttataaaataaagtagtagagaaattagggaaactgctttatctgaggccaaacaaattcaattaaatagaaaagagccatattacatctaaaaagaatctttaacatgcccttctatattcaatcagtctatttacatagaaaaagatcttattcaacaataacagaactgtcgtccttattaaatggaaaatgaaaatccatctttatctgtgacatctcacgtatcactgtacgatccagcacacgtgcataatgacgggtcatctggacattggtatgccccaacatcttagcaacactctctatcgagacaccattggccagagcaaaagtggcaaaagtatggcgcgccacatgggtggtcaatgttttctttataccgcaaatatcagcaagttccttaaggtaggcgttcattttttgattgcaaagtaccggaaaaagcacaccatgtttcttacaatattcattggtagaatacttttccaatatctttaatggtatttccatcaatggaatattacacatgattttggtcttctgtcttcccttgcgtatccatctgacaccgttcaagtcctccacgatatgttcctttctcaaaccatgaatatccgagaaagccaaaccggtgaagcaacagaacacaaaaatatcccgtacctgacttaatcgtggaatatcaatttccttcgatatcagcttctggatttctgaatcttccaaaaagtccggttccaccttatccaatgaaaatctaatttctaaaaacggatcgttcttcatccatcccttagccaaagcaatacggataatcttcttaaaattcttcaaatatttggtggcagtgttatgacaacactttttctctgtcttaagccaaaactcgtaatcctcaataaactggcgggaaatttcatccaaaagaacatctttcttatgatatgtctcccagacaaaatcctgagtatgcttcaaggatgtctcataacgctgcacggttgcaggcgccatgtccgtaccggacaattgggcgcatttatcattatgttcacggaaaacctcaaacagggtacgctgtacgggggcatccttacccagaaaacggtccaggacactgccggcagaaaccgctacaccttctatttccagttcacgctgaattttcattatcctcaaacggatagagtcaagatacagattcagttccttgtactcacgcttcttttccagggcctttccttttgccgcactccagaattccggaagaattgttttcttcactgaagcatcaacccgcactccattcactgtaattctcatcattatcggagcctcaccgttccgattcaatttcgtcctacgaatgtagaacaatagacaaaatgttgttctttccatcttacttgttttttaatcacaaaactaaatttccaagagcaacaagtcaagatgcagaacactgataaacaatgaattatttacttaataggtgtacctgacattgaaggcaaacaggtacaccgaatagtacaccgaaagaatgctttaatatgcttatttttgctatgcaccaaaataaagaaaatccccgtaaagtattaatttacagggattttctttattttgcaattctttccagcggagagacagggattcgaaccccgggtacctcgcggtacaacggttttcaagaccgccgcaatcgaccactctgccacctctccaaaacttccttgtcagaagtgcttttcgttaaaagcggtgcaaaggtacgaagatattttaaacttgcaagagttttcactaaaaatttaatctaatcttttcctaaggatagcaattaataggtattttatgttgaaaagcataaaatagagcatatttatgctgattatatgaaaaatgattgtaactttgtgcgctctaaagaataggataactacaacctctaattttatcattttatggaattaaacaagatctttaaagacggtctttggagcagcgaaatcaacgtcagagatttcgtaagtcataacatcactccgtattacggagatgcttcattcctcgaaggacctacagaacgtaccaaagccgtatggaaccgctgcctcgaagcactggcagaagaaagagaaaacaacggtgtccgctcattagataatgttaccgtatcaaccatcacttcccacaaggccggatatatcgacaaggaaaacgaactgatcgtcggcctgcagacagacgaacttctgaaacgtgccatcaagcctttcggaggtatcaacgtagtcagcaaagcctgtcacgaaaacggcgtggaagtggacgaccgcgtaaaagatattttcactcactaccgcaagacgcacaacgacggagtattcgacgtatatacggaagaaatccgttccttccgttcgctgggattccttaccggacttcccgacaattatgcacgcggacgcatcatcggtgactaccgccgtatggctctttacggcatcgaccgtctgatcgaagcaaagaaggaagatttgcacaacctcaccggtccgatgacagaggcccgcatccgcctgcgcgaagaagtggcagaacagatcaaggcactgaaagacatgaaagtgatgggcgaatactacggtctcgacctgagccgtcccgcttacacggcacaagaagccgtacagtgggtatatatggcttaccttgccgccgtcaaagaacaagacggtgccgctatgtcactgggtaacgtttcttctttcctcgatatctatctggaatatgaactgagcaaaggaaccatcaccgaatcgttcgcgcaagagctgatcgaccagtttgtcatcaaactgcgtatggtccgccacctgcgtatgcaatcatacaacgacatctttgcaggcgacccgacctgggtaaccgaatctctgggcggacgtctcaacgacggacgtaccaaagtgacaaagacctccttccgttttctgcagacattgtacaacctcggcccttcaccggaaccgaacctgaccgtactctggagcccggaacttccggaaggattcaaagaattctgtgcaaaggtttctatcgacacttcttctatccagtacgaaaacgacgacctgatgcgtgaagtacgtcagtccgacgactacggaatcgcctgctgcgtatcataccaggaaataggcaagcagattcagttcttcggtgcccgttgcaacctggccaaagccctgttgcttgccatcaacggcggacgttgcgagaataccggtacagtcatggtgaagaacatccccgtactgaccagtgacacgctgaagttcgaagaagtaatggacaactacaaaaaagtgctgaccgaaatcgcccgcgtatataacgaagcgatgaacatcatccactatatgcacgacaagtattactacgagaaggcccagatggctcttgtagatacgaacccgcgcatcaacctggcttacggtgtagccggactttccatcgccctcgattcactgtctgccatcaaatatgcgaaagtaactgcccgccgcaacgatatcggcctgacagaaggtttcgacatcgaaggagaattcccttgcttcggtaacgacaacgacaaggtagaccaccttggcgtagacctggtatacttcttcagcgaagaattgaagaaattgccagtttacaagaatgcccgtcctaccctctccttgctgactatcacttccaatgtgatgtacggcaaaaagaccggtgctactcccgacggacgtgccaaaggtgttgccttcgctccgggtgccaacccgatgcacggacgcgacaagaatggtgcgatcgcttctctgagctctgtagcgaaacttcgttaccgtgactcacaggacggtatcagcaacaccttctctatcgttccgaaatcactgggtgctacggacgaagaccgtatcgagaacctcgtaacgatgatggacggttacttcaccaaaggtgctcaccacctgaacgtaaacgtactgaaccgtgatatgctgtacgatgccatggagcatccggaaaactatccgcagctgactatccgcgtttccggctatgccgtaaacttcgtgaagctgagccgcgaacaccaactggaagttatcagccgtagcttccacgaacgtatgtaatctattactctatatgatgataaacgtacattcatacgaaagtatgggaacattcgacgggccgggcttacggctcgtcgtttttcttcaaggatgcaacttccgctgcctctattgcgccaatccggatacgatagcaggaaagggaggcacgcctaccccaccggaagaaatcgtccgcatggcaatgagccagcgccccttcttcgggaaacgaggaggaatcactttctccggaggcgaaccgacgtttcaggcgaaaacactcgtcccgctggtccgcgaactgaaagaaaaaggcatccatgtctgtctggacagcaacggaggactttggaacgaagacgtagaagaattattcagactgaccgatcttgtgttattggatataaaggaattcaaccccaaccgccatcagacgctcaccggaagaagcaacgagcaaaccatccgcacggccgcctggctggaagaacaggagaaacctttctggctacgctacgtgctagtgcccggatacagcgattttgaagaagacatacgcgcactgggagaagcactcggaaaatacaagatgatccaacgggtggaaatactgccttaccatacactgggcgtacataagtacgaagcgatgggacaggaatacaagatgaaaggggtaaaagaaaatacccccgaacagcttgaaaaagctgcggaggtattcaaagagtatttcactacggtggtagttaattaatggagaattctccaatgacctcaaagcaagggcattctttaatccgttcccaaggatctacgatcccattatagttggtgtcgggacttaaatcccgatgccctactactttagcttccggataacgctgcaacaattcgtgtaccaagcgatgtagcgcctccttctgacggggtgtacgcgtatccgcagcttttccattctcatccagaccgccctcataacatacacctaagctgatcgcattatagccacgtgcatgagctccgaccgtatcttcatcccgcatcggctcaatctcgcccgacttgcgtatataataatgatacccccagcacgaaaagccacgataacggtgagccgtatccacatcctttgccgtaaagtcgcaatcgacacgggtggcggaacaatggatcacaatcagactaatctttctcatgttccttttccctttccgtcgttttcactttgcacacctccttacaagtagtatgatagcgcacttctctcaccaccctgtcccgctttctctttccgaagaaaggaatcagatacatgatcacatctaaaatccgacttactatttctttcatcttatcaaaatattaatggaagttattctaattcgttattaccttgacccgtctgccaattataccgtagggtccggagcctcttcatcaccggagccatcaccaccggaatccggattcttgtcagggtcttctcccccgccatcgcctgcacccgcctgcgccaccgcacgagtctgcacttgctgataactcagaatcttcatcaactccgccagcgtcttaccggggcggaaaataagatgcgcccccttaatcattgaaccggaaaattccttgaccgatgccgcaccttcactgttgagtcctatctgcaaactgcccaaatcgcccagtctcgcaattcttcctgccttcaacgcacgcttcacttcgtaaagaatacccgaaatagccgcacgtacatccgtttccgtacaagtagaacgactggtgatcgcttcgcacaactcttcaaagtccaactctcccgacgcctgcgcctgtgcataatactttgccggttcgctcttttttgcaggattcttgcgcggcaccactgaataagatactgtcattgccataataaaataattttaaagtttataatacataggatgcatccccttcttgttaacagcacaaagataaggatagccggacaagccatattccccaacgaagtttcttgattcccaacgaataaaaacgaagtcaaacctttgaataacaaggaattttatgtaactttatagcataaaacaagaagaaaacatcatgaattacaaagaagattctttccttatccgcacctataccaaagcggaactggctcacctttacaatccccatgtctgcctcaaagttgctttacaaatacttcgtcgttggattatttacaacctccctctcctgcacgaactcgaacaggaaggctaccgcgcacgcaaccgtctcctttcgccgaaacaagtggcaactatcatacactttttgggcgaaccgtagtaacttattgccattttatacaaagttcctttacacatttccgcaaagaagttcctttgcatcgacaaacaataatcaaaataaaaatgaaacatttcaccatatttcaaggtttctactacgcaatagcagagatgaccgaagaagaaatagtgtccactatcggcagttttacctaccgggaaaaagtcgaagaaatacgccgcatctttgcagagcaaggagaaaaggctgccaatgagaagaaaaaagaattgccggcaatcgccttctccgccagctaccgaggaaggcgtaccaaagtgaacctcgtcaaatatctgggacacatcgtgatagacatcgaccacctcagcaaagaagaattggcacgcatcctccctatcatcaagagatgcgattacacccgcatcgcctttatcagccccaaagggatgggcgtgaaaatcatagtacgcgcatgccatccggatgagacattgcccgaaacccttcaggaaatagaagacttccatcatgcagcttacaccagactcgtttctttttacaccgaactctgtcagatagaaatcgacacctccggtcaggatgtggcacgcacttgtctgttctcttacgatccggagatttatttcaatccgaacgctgacgcttttcttgtagatcaacctcaggcatcctacaaggtttcaaatcgtaaaaatctctccggcagtaaacaacagactcctccggacggccccccgacgaatgaagacacagcgctcaacgcccattccgccaacgcttctctggtgctgactttaacctactatcacaacaagtccgaaaaatacatagcgggcaaccggaacaattatctgcaccatctctcatgtaccttcaatcgctacggcattccgcaggaggaagcatccgcttttatcaaaagccagtttacagactttccggcagacgagacagtctctttgatcaatagcgcctacgctcataccgacgaatttaatacctgtaagctgaatggcacgcagaaacgaatattacggatagagcaatatatcagcgagcactacgaaacacgctacaacgaagtgctgcatatcatggaatatcgcagaaggcatcccgacaccgagaaaccggagcctttccgcatcttggatgagatgatggaaaacagtatctggatagaaatcaacgaactgggatatccctgcactgtcaaaacaatcgaaaatctgatttactccgatttcagccagtcgtatcatcccattcgcgagtattttgaattactgcccgaatgggacggaaccgactatatccgtatcctggcggatagtgtccagacgagtcatcaggagttttgggcggaatgcctggaacgttatctggtggcgatgtgcgcagcggctactcaggagaatattgtcaatcacacggtgcttctgctatgcagcgagatacagaacataggaaagactacctttatcaataatctcctgcctcccgaactgcgtgcttatctctctaccggactaatcaattcgaacaataaagatgatttagccaaaataacgcaggctatgctgatcaatctcgacgagtttgaagggatgagcggccgggaactgaatgcattcaaagatttggtaacgcgcaaagtgatcagtttccgtctgccttatgcacgccgttcgcaaaacttccctcataccgcctcctttgcaggaacctgcaattatcaggaagtgcttcacgacacgacaggcaaccggcgtttcctttgttttcatccttattccatccaatttattaccatcaattatgcgcagctctatgctcagatcaaatatctgctgaataagccggggtaccaatactggttcacgcaagcggacaatgaacggcttgaagagaacaacgaggctttcatctttcattcaccggaagaggaaatggttcttacgcatatccgcaagccggaacgtttcgagaaggtttattatctgactgtcagtgagattgcggaactaatacgtgagcgtaccggttatcagtattccatcggatcaaaaatacagttggggaaggtgatgactaagcaccattttgaatccaaaaaaggaaataacgggcgccgatatgccgtatttattatagatatcgagcaggtaaaatcaaacaggctgtatgaatagaagcaggaaagccttgtgaatatagcaaaatgcagagtcatcttgacagatactctgcatttattgtttttacaaaatcattgaaaattcgattttacagcctaacgcattcatgatacgatagaaagtagatactttaggctctgtctgaccactttctactcttgaaatataagaacggtcagaaccgatacgccgggctaattcagcctgagtgattctagccttttttcttgcgtcctcgataatctgtcctgtataaaaggcgtaggccttttcttctgcctctgcacgctcgggagtaccttcagcaccaaatttggcatcaaggacagcatcataatctactatttgatgattgtttatctgcataatattcctcctttattttaactgctttatcaatttcatgaccaggtgttttttgtgacttcttttgaaagccattgaaccacacaacaatattaccatcatcaaatatgaaaaatacccggtatatattgttattatattctgtgcgaagttcaaaaactccatcccgaataaacttcacaaatttagcggagagtctttcttgtgttttcaacaagagtaatccgtattgaatctatcttgttccttttcggttaaagtctccatgaaagcctcaaagtaacctccgtatgtacggatcttacgtttcttttccataacgcaaatataaggaatgttgttcaactatacaacacatttcctcgttttatattatttttcatcatcttcacccccaaaagtgagaggagtgagagaggaattgaaactttttctattttatttctttatttctactttctatatttctctaaaaaaaatacgaatgttagaaatcctctctcactcctctcactttttaccttttctttctccaaaaagacggcgggaaatcgaaaaaacacaaccgtcttttttctatttctcaccgcattttcaaatcagcccaccaattgaagcagacttcaggaaatatttgttatctttgatgtgcaaaagatcaaaagaatcagatatggacaacttgatgcgtaaacttcctattggaatacaaacctttgaagatatacgaaggaagaatatcttattgtaaagatcggagtggaatttagtgcagaaagccggaacttaaatcgttggttaatcgaagtgataggaaagtaaaatatgaaaaaccgaaggattaagatatccttcggttttttcgactatatacccatgattggttttacgatttcaatcttcaatcctaatgcattaataattcggtagaatgttcctacacttggatttatagctccgctttcaatacgtgagatatacgatttagttgcattgattctctttgctaattcagactgagttacttttgcttcccgtcgtgcatccaacagtatttgaccagtataaaaagcgtatgcctcttcatcgaacttttcacgttccggagtcccaggtgctccgaactccttatcaagttctgcgctgatatcagtcagcatgttgttttttgtactcataatattcctcctttatttttaatgccttatctatttctgatgatggggttttctgtgttttcttatggaagccattaaataaaacaactatttgcccttcatcaaaaatgaaaaagatacggtaaatgtttccgttatatgatatacgtagttcatatagaccatcacgtataacctttataaatttgataggcaaacggtcttctgttccaagcaatgaaagcacatatttcactttttgaatttccttttctgtcagagtggcaagaaaatccttgtagtattgaccgtatgctattacttttcttctcattgtgcaaatataataaaagtttcaatatcatacaacttttaaagtcgaatttatactgctaacgggcttaaattccctctcaggtactcattttattcgaatttcccttccgaataatctgaaaactccccggcacgttctttcttctcatacgagaccaacgtttcgatactgagcgctttcccgttcttagggcttatgacatctatcacacttgacaaggaccggaacgtctgttcgcaattcgcatctccattatacgtcaacctcccccggtcaatggcacctagaataacagaaacataccgtttcggatctccccgatattcgataacagtgggcgtcatttgttcttcttcccgaatcagttggacgacaattcttttttttggtcaatcagctccaacagttttttactatgcacactgatttgtgcatctacttcacgaagttcattcttcaatgaacaaaacaattcatcactcaatgaattttccataaaaacgatttttattaattataaaaaagccattccggaaagcacagctattgcctgcttcccgaaatggtgactaataccttcaaaaacaatgactctatttttactttaatgtactcaatttatttcacttcttttctctcctgcattccaaaccaacaaagcaaacactactgaaagcaaggctgcaccaatccaaaaccaattgatatatgtaaaatcgtaaacttctactccattttgcaccgtcttctgaccttcgatcagaatgccactcatcacatcctgcaaaccggctcctatataactcgctataccgacaactcccaaagcggctcccgaagcattgctgggagcaatatcgacagccatcagtcctcctaaaaaacaaatcagcactccaatgcccaaaccgaagagcaccatcgccaaagcatccacccaaaaatgtacccccggaaccaatagaaacaaacaaagagcagacacattcattaatccgaatatcaaagccggaacattacgactgccagcaaaaaacttatctgaaataatacctgagaaaaccgtacctacaattccgcatacagaactgatagatataataaaactagcatccaaagtagaataacctttttgcgcttccagatagaaaacaccccagctattgactgcataacggctgatatacataaaagcactggataatgcaagaatccaaatagcaggattcttcaaaactgctttctgagctttattgaattcctcggtttgcttaccggaaacggaatgagcatctgacgtcccccaccgatctagcaaaaagccctgactttgaggcgtatcacgcataaaagcaagcatcatcagaaaaccaagcaaaccaatcactcccgcaccgatcatcccataacgccatcccatccaactgaccagcaaagcgatggatataaaagtcagagcttcacccaaattgtggctggccgaccaaaagccataaaaagtacctcgctctttactactataccaacgagtcagcgacacaactcctgatgctgcccccatcgactgaaaccaaccattcaacccccaaaggagaacaaaagcaaagaaggaattcgtgaatcccagacataagttgatcagagcagaacacaataatccggtagacataaaacgctttacattgctacggtcagcaagaaagccattggtcagcttaccgacggcatatacgaaaaaaaggcaggaaccgataatccccagttgggtttcggtaaaaactccgtcttctacaatcggtttacggattacattcatactcaaacgacaaacataataaatgccatatccggtagtggcagacagaaaggtagcccaacgaatacgcttgaaacggacagagcgttccggatcagtctctcccccggacaccggaggagagattttataaaaatccaatagtttaaatcccataaagaagtctatattttaatgatacgcatcttggccgttttcactacgcttcttacgcgattgcaaatattccagcagataggcagtacggtctgtctgaatgatggccgctccgagtgtatcgatcagataaccatatccttcgtccggattctccaacgatttatcatcatcatgtccgccagccatcgtatcccacaacgtattataccagattttactttttcctttcaacttcgtttttacttgcttgggggcctggcaggtatccgatacaaatagaagttcaaaagctacgggatgcagctccgtcataaaatcatccagttgcttcattgctcccggcttatccaaatgaatgataggcatataaatgatacggtccagatatttacctaagtctttctttacgtctgccacaggcttggaacctttcatgataatctgatccactgttcccgtcttttcgaggatgggaaaaatctcgtcaaatatcggatatgctttatccagattgaccatcacacgacctttggcaacccataaagcctcttccaaagtaggtacacgatgcttggttttgagtgccgctccatttttcagatagagtgtccggatagaatccaatgtccattcggctacctttccttttccggtagtcgttcggtccagcgttttgtcatgcatcaggatcaattgaccgtctttggttttctgaacatccagctccactacgtcagctcccagacgaatggaactttcaatagcggcaagtgaattttcgggtgcgtaacgccagtctgcccgatgagctacaaccgtgatttctttattgtcagggttcgttatcttcgcataaatggctttcaccggttcgtctgccgacaggcagaaaggaaatgcgaataagattcctatcattatatatttcttcatatctatatgtactattatctgtatcctttagactttaaatatttggcagctacttcagcatagtctgtttgcacaatgttgatgcgtttgttaatcattcccaccaaaccggagtagttttccgacaacatattggtatcattcgctccgacaatgttggagaaaagaagccagcctttatctttaatctcattaaccatcgttccacccatagcatctgacgtagacagctgcatcatttgtacattatcagtgtaggatgaggagaagtatgtgatgtcatcggtagctttcgccatcgggtgcaacagcaaactactgttggctgccttcaaatcaaatgcataattgcgattgttggatacatacagcaaagtggaaccttccatatccaattttttaagcaatgcgacgatcgtatttaccgcaacattcttgttgacaatatccagattataataaacttttccttttcctttcttcatcgcttcctccaaagtcgggattcgttcgccagttatattgccggatgcatctttcagataaaattgttgtaattgctgataagtaaagtctcccaccgcaccgctaccgtttgttgtccggtcgatggtgttgtcgtgcatcaataccaacacaccgtcagaggtcggccgtgcatccagctcgatcatctcaactcctgctttgaccgagtgttctatcgcaggtaacgagttttcgggaatcccctctttcatccctttttgggtatttccacgatgcgcgcagagccacactttataagaggtgctttcaaacagactctttaaatctgctttcaaattccccgtcacaggcaactgtcctccttcttctccaccgggattctctccattccctcccgattgggctccggagtgacgtctgtccttccctttcatcggccaggcagaggttgcggccccggtaattccctcatcttccaaagctaccaacacgctctttgtagggtccaccgtattggtgactccgatataaatcgctccatccggtccgatggtaggcgaactccagattttaccgattcccgcttcccaatctccttttaaaggagagtcactttcactaatcaacgcagcaaggtcttttttcagaatcaattgttcatccgattcttccggtttaatgatataataattgccggactgggtgccgaaatgtatgtttcctgcttgatcaattgccgcacaaccgcttacatcttccgcaatgccgtaatgccattggatagctcctcccggagacaaagagatgattcctccggttgcttcccccggagcacgtttcactgtaacgataatgcttccgtcgagtcctatcacaacaccgccttgatccagcgtgccgacattgcccaaaggagtacgccacttctccactccatcacttcctatagcaaatgcgctacttcccattcctgcaaacgtagctgttccgtaaatagtaccaacctcatctactgccggagaaccgttcatattttctgacggcttatcatcgccggagctaaatacctgccaagcccacattacatttccaccggcattcaacgcagaagcagaagccccgaacaatccattctttccgccaccccaaactaaagtgttgtttgccaatactattcctgcagatactcctccggaaggacctccggaattatccgcattcgctacgtatcctacccgatagccggtcaccttatctactgcaagtactgatcctgtagaaccgccattacccatatatacatgattctccccaatggcacaggtcaggtaattgatacggggtgtggaagcttttcctttattccagaagccattttcagcgtcacctgccaccagccatttcttactcccgtccggatttattgcatacacacgtcctactttgccactggtgtctccggttcctacgtagattgttccgtctatttcaatgcttggagtagtatgcgtatttccggatggtgcatcgccgtcagcagatgtccaaaggtcaaattcccaaagctggtctcctgtcgctgccgaaaatttacgtaaataatgatcattggaagtcatatacaccccattatcatcactgacagccggagctgtagaacgtacttctcctaacacatgaccgcctacccatttcagttttacatttcctacttcgggcaaaggctccgaatcaatggtcaacaatttatgagccatcgcataagtgccttttgcgtccttcacatgaagagtcaccgtataggcaccgttcgtttgataggtaactacgggattggggtccgttgaagtctttccgtctcccaaatcccactcataagtgtagtttccttctccgcctacggtttcattagtaatgcggacttcatctccgacataatacagcgacttgtcaaaagagaatctggctgttaacgcattttctttccagtcatccgaacaggctgaaaacagcagcaagcagatgcaaaacgttgcaaatatttttatattcttcataatctgttctttcttaatttattaataaccatcgttttgaggataattttcggctcctgccaaatcgcgttccgactggggaaccggatagtacattaaatagtttcttccgttcagcgaagtaaataaatccaaccgattggtcctcttcaagtcgtaccagcgctgtccttctgcatacagttcacgatggcgttcgtccagtatctgattctgaaactcggtgtcgctcatgcttgaaggtaatgagactgtagcataacgcttattcataaactctttcaaggtcgacaggccgttcgttgctcccagcgcttccgctttaatcagatacatttcggctacacgagccactactataggagtttgagaaggttgttcgttggtcacaaactgcccggtgcttccattcggaaatttgatgatccggctattgtctgccccaaaaactgcttgggcacggatatcctgcttcttgactgaagtatcggcataaagatgactatagcaatcggcagagggagaataatcccatgtcgggtcaatatcattaacagtctgatagaaaagtaacaatcccgtgctgcgtttattggccaaagcaaaaatcagttctttgctattactattggagatgaaggcattagcatattcaaccgatgtggtactcaatgcgaaatcggacttagtaatcactctgtctgcataaatagccgcattcgtataatctttcaaggccagacaaacttttgcattcagtgcatcacatacacttaaagatacgtaaaagcgatcggtaaattccggaagtaagctctctgccttgcccaaatcttctttaataaaattccacacatcagcttcgggtgagataggcactacatcgtaagtacgcttacgcaaaataggcgctcctccccaacgggtgactaaatgataataaatcaatgcccggaaataatagccggttcctccggtctgtttcaccacctgactgtctttattggaggatgcttcgtaggtctccaccaagaaatttacttgctttaaggctgtgaaacatttctgccactgccccaatacatctttggaactcggagccatcgacatcggatcattcatggaaaatcccgggcccgccttgaaattctctcctttcacatcaccgtccatatagaacttgaaaaccagttcttccatttcagcatataccccgttaagcaactttgtcaagtcggactcgctcaatgcgtcttgaggtatcttgtccttcggtcgcatttcatccagcatatttgagcatcctgtcatccataaaagacaaatgccgcatagtaaatagttgatcatataaaatcgtttcatactcgtctgtttttaaaagtttagattcaaaccaaagataaatgttctcaatacgggttgcaggccgaaatcaactccgtaattggagtctccgggactgcccgagaaagaagtttcgggatcgtaacccgaatattttgtaaaagtcagcaagttgtctgccgaaacgtagaatctcagagagttcacatgaattttcttcgtgatggattccggcaaggtatatcctaatgtgactgttttcagtttgaagtaggaagcatcttccagatagcgggtggatgtctgaacattgtagtcataatcatatccggtatgcacaccgattcttacaggacggggaatcgagttgctggtgccttcaccgcgccagtatccgttggctacctccttactgatattgaagaactgttctacggattctccatggtcgcccacttttacgttagacagtgccagacctaaatggtcggtaccttcggaaccattgacaccccgccatgccgccatcacttttccacctacggaaaattgcccgaataatgacagatcaaaacctttgtatgagaaattagaagtaataccaccgtaaaagtcgggaatagcttttcctacattcacacggtcggcgtcggtgatgtcgccatcttcattgtaatcaaaatatctcacatcaccggcacgcactcccttggcataaagtttggcgggaacttcatcgtcacgctgataaatgccttccatcttcaacatataaaatgtactgatgggttctccgttgatcaaagcatgcatggaaccacccaaaaggttactcccgctactgggtacaacgtacatttcacttccttcaattaaagagagcagtttattctttacgaaagaaatattacctcccaagtcccatttgaattttccggtgagaattttgccgtttaatgccaattcaagtcctttattctccaacgaaccgatgttagactgtagagtggtatatccggtacttgcatttacaggtttcttaaacagcagatcggtcgttttctgatagaacatatcaacgttcaaggttaaacgagactgaaacatttcgatatcaaaacctatattgaactgacttgccttctcccaagtcagcgcacgtgcgtcctgtgaaatctggaatccggcagagccattgtaggatgcgcctcccgcactaatgagcgacaacggagcataattgctgacacctgccatgctgcctgtcataccccagcttaatctcagtttggcatcattgacatatttgtttttgggaaagaagccttcattggaagctctccatgcaaaagaagccgagggaaagtaaccatacctcttattcttcgcaaagcgggaagaaccatcgctgcgtaacgaggcattcaggatatatttattatcccagttcagggcgattcgaccaaagtaagactccaaagcgtaggaagtataactgatatctccggcatagatgttcggtccggcattaatgagatcgaaactggacgaaggataggcaccattggcgtaattatcactctttgctccaaactgttcgtaagtgtatttctcgaaagagtgtcctaacataactgagtaaataagtttattccattcgttattgtaagaaaaaacattatcaatcacataacggaaactctggtctttctgttgtgccaaagctccccaaccactactgtttttacgggcatcgtgcttatccgataacttctttgaaacattatccaaaatgccgtacgcactcactgtcggtgtatatttaaaacctttgaagggggtgacgtctatactgaatactcccgacaactgatatttctttgctacccagtcttcttcatttattaacatgaggggattatggcgcagaatatccgttccattcactttataggatgtcccgtcttctttgtaaggagaataccaaggttgttcctcacgggctgtacgcaatactttcaaactggtactcgtttcttccaataagtccgaacgacttgccgaacctgccagattcatatttagtttgaagatgctgtttattttatgtgagaacttagcacgcatattgtattggtcatacttactcttattcaaatagccttcctgagtattggctcctaaggaagcaaaaaaagtagtcttttcatttccgccggaaatgctgatagaaccggcacccgtctttgagttctttcttgaaatctctttcacccagtcggtttcctgaatctgagaaggaatatacagttgcaggttggttcccatctgcacattgtagttatcaatagcagcctgcatagtattcatgtattccgttgaattagccatctctatatcactggcaagggaggcaaagccgtaacggccggatacttcgatctttgttttcccctgctgccccgatttggtagtgatcagcaccaccccggcattggcacgcgaaccatagattgccgctgccgacgcatctttcaacacttccatactctcaatatcattgggattcaaattcggatatttttcgctggggattccatccactacatacagcggtgaacttcctccgctaacggaaccgataccacgaacagttatattgggagtttcacccggtgttccggaggcagaagatatattcacacctgccacacgaccttgcaacatcttaatcggattgtaatcatttccctgatctatattctccatcttcactttactgatagaggtagtgaccagcttctgtgactgaactccataacctactactacgacttcatcgatcatcttactatcttcctcaagtactacctttaccaatgtctgatcggtagtagcaagattgactgtcttgtaaccgatataagagatggtcaagactgctttctccggtacgtcgggcaatgcgaacttaccatcaaaatccgttattgtcccgtgagactcacctttaatcacgatacttgcaccgattatgggttctccgttggcatcgacaactgttccggttacttttttcgtcagttgtttactttgtgttttacgaatcaacacaatgacgttttcctgttcttttttgtaagtcagttccattccttccaaaagacgtgtcatggtctggtcgatcgttacatcccgaacgttcaatgaaactttccaactcaattccggcagactctcactgtagaaaaacttgtaattactaacttgctcaatcttttttaatgaggctcttaacgaaatgtctttcaaatcaaccgttatttgagaataagcggtcaaagagatgctcatgaacagtagcagacaaatggcccgtaatgttctccagttcttacttctccctgctgtagactgagggagtttcacaaagggtgttctgttttccatatatcaaaacttttaagttgtttgacaggtataccgactgctctcccctttcgtccaatcggctatctatctttaactcttgttaaccaacggttcttcataaattaaaaagccattccgggggaaaactcaggaatggctatatctaatttcatgataaagatgcttatctacttctctttcaagacaatgaccgagccatccatttcataataaaaaggcgaagtaagcatgagaatattcaaggcgttctgtatgccgccactaggaatcgttcccgtaaagtattctttaggaagtttattcgaatcgaaacgtatctccacatcataaatccgtgaaagagttttcataatgttttccaacgattctttctcgaaatagatatttcctttcgtccattcaatataatcgttgggatgcacttgggtagcaacaagttgatgagtgtttttattgtattctatcttatcaccgggcttcatcatacgcgaagtttcctgagtgtaaattcctactttcccttccaacaaaacaaccgtaatgtcttttgcatcttcataagcagatacattgaaggaagtccccaatacctttacttccaaatcacctacctgcactataaacgcatgtttctcatcaggagcgactttaaagtaggcctcaccattcagttgcactctgcggactttctctccaaaattattcagataactcaattgagaagctgagttaagcactacattcgttccatccggcaattcaactgtagctttatcacctttatctgctttgacaataaaaggcgcactggtcatttgcgacgaatcgatcaaataataagtaaaaaaagcaatacagacaggtaacaaaatagcagccacccacctccaaggagtcatagggagagttctcacgcccttcgttctcggtgacgtatgtttcagtgttccttcttttatccgtgcaaagagtttatcgcgcagtatcggatcaatagcggcatccgacttggtaaactcctgttcccaccagttttgcaactgacggtcgttctttatccaatcggacaactcctttatttcagtgtccgttatatttccttcgaaatatttttcaatcagctctttataatgtatcttatccatcttcctacttatttacaggtatacattttcatcctatctgccatccaaaagcaaagattacaattacatttcattaacaaaaaaggcaaacagaagcgcaacgattttatcataatgcttcattaactgctcacgcataaacttcacggccaaagatagttgcgtggcaactgtactttcggaaatacccatcatctccgctatttctttatttgtataattttgccttttgctcagaataaagattttcttccgttgcgccggcaattcttcagccaaagaatcgatatattcattcaagaatcgcaagtcaatactttcttctgtctgggagtcacgatctactcctgtatttttcaaatattcattgtaaacatactctacagtctgacgctgatacatattcattaataaattcttggcgatggtacaaagaaaagaaataaatgaagactccggctctactcgctcacgtacttcccaaacacggataaaggcagactgaactacttcttcagccatatattgattgccggaagaaattcgcataatgaagttgtataacttaccgctatacatattatataacctttcaaatgcatgaaaggagccgttctttaattcggttaataaacgtttttcatttatagaatccaccatagcttagaattttgcaacaaaggtatgttaccatcggtcagaaacaggtgacaatgatattaatattttctcagatttccgatttttcagcaaagtttctgcatataaaactttaaaagcgatattttaaccgttattggtaaaatatcgcttttaaaatatatagctcaactatattgactaataagtaagtcggatacccgcctgaatattgaagttgaacggattttccttacggatggtctgtacatcggaaccgtcatcaaagaaataagcaacaccgggttctacgtatatacctacccgtttggtggcattaaactgtgcgccgactgcaccggagacggagaattgcaaaggtttcacagtttccttctctgtgcccagcttgccataaacacatttctcaatcatacctccaccggatacataaagagtaaacagtttcttatcaaggaagttccagttcgcttttaacgggatacccagataatgcagtttctgctcggtcttctggtcgctgtccgcaaactttgcatccgaagaaagcaaggtgtaagtcaatcctgtttcgacagagaaccctttcgccagactcttgcggacagataatccgaaggagataggctgatggtgctccatatcgaccacctgattggcctgacgcaaataaggtactccatcttcaaagaccaattgctgatcattgggtatgctcagcagaccgtttgataccgataccatgctcacacgggacatataagaaggaatgcccgatcccaactctgtagaagcaccaccggagttacctaccgaaagtcccatcgaccatgtgcctttctgtgaagatgccttttctgccggaatatgcagtttgtctctgctggaagggcggcgcggcttatttctcggttgttccgtatctgcgggcttatgctgggcggccttcgtttcttccaccggttccacttcttctttttctttccggtcgccggtctgagcgttcagttccgaaggttgctgctcttctttcttcaccggttcgtcgatatttgccgtcggttggggaatgttccgttctgctttcgcgatgcggttcttcactaccggacgcactaccggttctaccgttgttcctgtcatatccggttgctgcgcatccggcaaaacatccggtacagaggctaacgccggagtcttggcatgacgaatttcatcagcagcaggagtcccgaggaaatacaggctgaccgatgacaccaaagccaataaaatgacagccgcagcggctaccgtccatttacgataaggatatatcttcctctccacaggaggcataagttctttttccagttgttcccaaccggaagcaggaagcggctccgagtaatccccgagcttctccttcaacttattcatccataattctttctcttccatatctctacctatccgttattcattatccattcttttactctcttagtcaacacgctcttcgcccgaaataattgcgaagccgatgacttctcattaatacctaacaactgtgctatttccttatgcgatttttcctcgaaggtgtaaaggttgaacacggtacggtatcctgccggcaactcttcgataaatcgcatcaataccgcttgcggaatcatctctacagccgaagcgtcgggttcctcgtaatcttcgggcacttcttccaaaggcgtcgactgactgattacatcactcttgcgaagatactgtaaagcggtattgaccatcacccgttccatccaggcccgcagtgagccttcaccccgccaggtgaacttgtcgaaagaactgaatatctttataaaaccatcgtgaagcagatcctgagctgtatcacggtcgccggtatagcgcagacagacgcctagcaaacgccctccataatgctcatacaattctttgcgggctcgattatttcccagcctgcattgttccgacaactcaaattcttccatttgcttatacacgtgtttaccttataaatgcagcaaagatagaaatactgcacagagagaacaactcttttgcaacttttgtttctttaacagatccaaatgcaatattttctccccccttgcattttcagagtacaaagcaagtaaatagtactcattaaaaaacatttttatagtatatgaagaaatttaaattcattgcattttttattgctgttatgaccacaatgccgatacttcagtcgtgtctggatgatgactcctcatccgattcactggtcatcggcaccatcaatctgatcagcccggatagcaaggatttctatttcactctggatgatggaaaaacaatgttcccgagcaatggaaacggatggatcagtgacaagaataaagacgggcaacgcgcctttgtgatattcaaagagctggaagaaccggtgaagggatatgactataatattcaggtaagagaaataaaagagatcctgaccaaagaaatcgtgactatgggggaaggagaaaatacggaagagaagatcggagacgataaaatcaattctacttatatgtggattacccaagacaagaaatatctgacaatcgaattccaatattacggcacgcatagtgaggacaagaaacatttcctgaatctggtcatcaacaacaaggatgctgaacctgctgccgatgatgccaacgatgagtatatcaatcttgaattccggcataacgacgaaggcgacaccgccgaccgtctgggcgaagggtatatatctttcaaactggataagattcaagatcagatgaaaggcaagaaaggactcagaatacgtgtcaagaccttatataacggggaaaaattctatgaagtgaaattccccgcatctaattaaatctagtaattatagaaacactctttttattataatatataattacgcaaaagagggcgacagttgtgaaactctcgcccttaattttatcataaagtgatccgtttatttcttcttattatttcttttcattcttgtcaccgaaataattccagacgagcgcactgacagccgctcctacaaacggcgccacaataaacagccataactgcgacaacgcttctccaccctggaacaatgccggaccgatgctacgtgccggattgacggaagtacctgtaatagggatacatacgatatgcaccaataccagagaaagaccgatggcaaggcctgcgaaagctcccgctcctttcttcggatcggtagaccccagcactaccaatacaaaaatgaaagtaaagaccacttctgcgatgaatgcctgtagcatctcgccgtcaccaaagccgttggaaccggtagccgtcggtccgtcgtgcccgccggtggtcaccagggcataaagaatagccgaaccgataatcgctcctataacctggaaaagcatatacatacccgcatcttttccattcatacgacccgagaggaatactcctaacgtaatagcaggattgatgtgacatcccgaaatacctccgatagcatacgccatcgccactactgaaagtccaaatgccaaagcaacgccgaccgttcccacgccggctcctacagtaccagccatactgccggcaaaaacagcacttccacatcccatcaggacgagcaccatcgtcccgatcatttctgcaatgtattttttcatattactaaataaaaaatggttgattctccaaatataaggaattaatacctagattcaaaatgtatgtgcctaattattactatctttgcagcatttttgaataaaaccaccaaaccataaaatgaaaaaaggacttttttatgctatactggcctctgtattatgggctatcgtcaatccgtttatcaagcagggactgagttacgacttttcgccgatgaactttgcaggaatccgctttaccactgtaggtatcattctttttgcttatacctggcataagggaatgtggaaagaaatacgccagcacagcaaactgtttctgaatctgatcctgatcaatatgtttatggggtacacagctttctatttcggtgttgatttcgtcagcggggctatctcttccatcattatgggaatgacccctctgatcaatgtactgctagcccatctgctggccagcaatgaccggctgaatgtgcacaagattatcagccttattgtcagcctcatcggtttgctgcttatcgtaggcatgggcagcaatggcgctccgctggactggaaagggatcacgggaattgtacttctgctgctcagtatcatctttcagggatattccgcgatttcggtatcggaagataaaggcaagataaaccctattttcctgaatgccgtgcagatgttcttcggcggactgctcatctatatgataggattaggtacggaagggtatcattcatttatcggaaagcctgccggattctatatcagtctttctattctggtatttatctcggtctttgctttcagtttctggtttatcgccttacagagtaaaggagccaaagtgagtgatatcaatatgtgcagactgatcaacccgatattgggcgccatacttagctggatcatgctcccgggagagtatccgacattcagtaccgttgcaggaatgattatcatagtcagctccctcattatctattttaagggagctgaaatagggcgatggttgaaacgccatacagccggaagcagtacgcaggaataaacaatattacagcaagtactgaatggattgcagggattgcatttctttgggtactgctgccagtatctcttctttgagtacattgagcaggctatgacggataaaatccctattggtcgcaagcactatctgccgtgtaggacggggaatggcaaacggacgtaccagtttcttttgttcttcgttcagttgcgaaacagccagttcgggaatgaaggtgattccttttccgctttctaccatacgcataaaggtttccatacttcccagatggtaggccatctgattgactttgaccgtttccatctggcagaaacgtacaagctggtcacggaagcaatgcccttcgtccaataaccagagacgttcgcccgttatatcggaagtgcgtatcacgtcgtgcttgaacagaggttctttgcaggatacatatccgaagaatgtttcatagaaaagtgtttcttctttcaggaaagtgtcttccaatttgctggctataattgcggcatcaatatctccggcatgcaatgcctgctggatattctgtgttttcatttctgtgacacgtatatccagttccggatacttttccatcagttgggggaagaagcggggaagtaaataaggtgctatggtaggcaatacccccaaatggaacacgcctgccagtgactgtttctcttcactgattatttctttcacctgcgctgtctgtgccagaatgacacgtgcctgatcaatgatcttttctccaatcgctgtgggacagaccggctgcaccgtacggtcaaacaacttcactcccagctcatcttccagtttctggatcatagcactcagcgtgggctgcgtcacgcggcaatattccgccgctctggcaaaatgacggaactggtcaaccgccaatatatattctaattgttgtatcgtcatctatcaaatatgattaagttatagatttcttctatgcaaagatagaaattatcagtttgacaacaagcattttccgccttatctttgcagtacagaaaaaagaaaacgaatataaatcattaaaaacaaatagaatatgaaaactttagaatttatcaaattgaacgaatcgggagcaaacaacgtagtagcatctttgcaacaattactggcagacttccaagtatattacaccaacctccgcggtttccactggaatatcaaagggcatgacttcttcgtacttcacagccaattcgaaaagatgtatgatgacactgccgaaaaagtggacgaaatcgcagaacgtatcctgatgctgggcggtactcctgccaacaaattcagtgattatctgaaagtagccaatattaacgaagtggataaggtaagcaacggagaacaggcactggataacatactacagtctatcagttatctgatcggtgaagaacgcaagattctgtctatcgcttcacaagccggagatgaagtaaccgtttcgatgatgagcgattatctgaaagaacaggaaaagctggtttggatgttgacggcttataacagcaagtaaatacaaggtttaggttttaagtgaaaaacaggctgactcgtgattattcagaatcagcctgttccatgtttataaactcagattagaaataagtctcttcgtcactcactgactctctacaaaaatatcttttgttagtcttatatcatccgaagaggcaccaatcattatccggaaatctcctgtttccacaacacgcgccatattccggtcgataatggacaggtctttttcggtcaaagtgaaaaagatttccttctcctctcctcttttcaggaagaagcgttcaaaacactttaattgtctgagaggctgaactactgaagcatattcatccctcagataaagttgtgccacttcttcaccgtcatagcttcctgtatttttcactttgaatgaaacttcaaaatagcagggagatttacgtattacctgtaaatccgaatattcgaaagtggtataactcaacccatagccaaaagtgtataatggagaagcagcctgttcgacataatcatgattgcagggagcctttttattataatagacaggtatctgtccaacagaacgggggacggaaaccggcaatcgtccggcaggattataatctccaaacaaaacatcagctattgcataccctccttcctggcccggataagaagcggtcagcaatgcgtcggcatactcggatgcccagactttatccagcggacgaccttcaatatagacaacgatcagtggcttcccggtagccttcaatgcattcaataaatcttgttgttttcccagtaaagtcaaagtagccctgtcaaacccctcgccacattccatgtcgctgatactcttttcgtcagcaattgctgcacccgtctcctgatagctcgtcttgaaatcgcgtgcgctggaacctcctaccaccgctattataacttccgaacggctagctgcctccaccacttccgctatttcgttcactgtcgtatcacgaatagcgcatccacgcacgtactccaccttagaaggagacagtttggagatcactccgtctaacacggtttttatgttttcatcttcttgcggagctgtatagtcccccagcatattataacgattatccgcattaggtccgacaactgccacttttttaatctttttattcaaaggaagaatcgaattcttgttcttcagcaatacgatagatgattgtgccactttatgtgccagtctgatatgttcctcactacgtaccaccttcgttgcagacttcggattcacataaggatgctcaaacaaacccatttcaaacttcatccgtaatacccggcatacggcagtatcaatcactgcttcactgatttttccggattgaacggcatgagtaagattcataaatgcattgccccccaaatcaatatccactccggcagaaacgacctgcatagctgcctcttctatagtaggagcaacaaagtgactttcatggactccttcaatactatataagtctgaaacaacaaagccacggaatctccactcgttacgcagtaattgtgtcagcagataataattagccgtacaggggataccatctattgaattgtaggaggtcattacagagagtgctcccgcatcaatcgcttcctgaaaaggaggaagaaagttttcgtgcagatctctagtccctaccgatgcataattaccgttttgtccaccttccggtaccgcataagctaaaaaatgcttcagggtagcgatagtagcatattcacgggataggtctccgctacctagccctatgaccatcgccgctcccagtcgtccactcaatacaggatcttcaccaaaggtttcttcgacacgtgaccagcgaggatcacgagataaatccagtacaggaccataactgatatgtgcaccctgtgaacgaatctctttagcaatcacatttcctacttcttcaatcagtaccggtgaccaagttgccgccatccctatgccggttggaaaaacggtcgttccaatcgccatatgtccgtgaggcgcttcttcagccaaaaataagggaatacccaaacgggtattttcaatcacatatttctgcaatgcgttgccggctttggcagccagttcgggattaagtccattttccaatgtcttcttagtccaagggtccgcacgataagttgcccacagcatacctgcgttcttttctttcattagtcttttaaacttttcagaaggatgtacttcatcgtcctttatttcgtacatttcccaaccaagaggacataatagttgcccgaccttttcttccaacgtcatacgtgaaagcaagtctttcacccgttcgtcaacagacaagaccggatttttataaggtaacagagaagattgggcaaaagccacgacattcatcgccaaccctacaatcaaaatatataatcgctttgtcatcatacaatatgatataatataaaaattactttccgttggtttcgcagaagtttcatgcggtgaaactttagttccaagctgacgaaacttttgtttcaagctgatgaaactttagtttcaagctgatgaaactttagtttcaaacaggagaaactttagtttcaagcctcagaaactaaatgttctgccaattgaaacaaaccaaagatactatcaattcaaagaagccatcaagagatcacacaaagatataataatccctatgttgcagataaattatctgcaacaggtatctgcaacactataagccactataaatcacctaataaacaagcaggtggcagatattgcagataaaatcaaaaaatattctagagagaggctatcgacacccaatttccgctattcccaaagaatcactttcgtctaccatacgagtcgcttttaacttaaaatagcgagcctcaaccggactaaagtacatattctgaagaatcggattattacggatgttcgagaattctccctgtgctacgacttgcatcgcctcttcggtaataccggcagacaattcgtatgatgagatcaaccctttactatattcactttgatcaggtaaataatagaatgaatggattgtacgattttcaccaagatcaatcatgatttccttgcctgagattaaagcagcagtctgatcgtccttgtcactacatttctttgcttcttccgtatccactcccaaaattgtaaaagggaaacttttcagttctgaggttgccggtgtataattttccgttgcatcgggagcataataagccccgacctcattgatacacaaacatgcacgagcatccgtaaaccgtatacgcaattcttctgtttcgatcatttcaaagcgtaacaaacgtttgtatcctacggttgtagtttcttcgttgcatttaaccgacagccactgatcgccctccttatattctacaacaaaggatttaaccctttgtcccaaaggtatatactcctgaatcattacccgattcatcttcgtcggctgactaaaagtgaaagtcagatcggcggtagtcactccgtcattggttgcccaataagtgtcgtactttccgtccgttacgccacgaaccttgaattgtcctccacgctcgtcggaagctgatacttttgcactgctcaataaattatctgccaactctttctgaactctctgatggaatgaaacagcattcaatgaatcggtcggatgaatcaaaccgttgcggtctacaggaaagtttaataataaagtcgcattatgacctacactacgataatacaagtccgtcagttgatcgactgtttttaccttgtcgtcttcctctgggtgatagaaccatcccggacggatagaaacgtcacactcggcagcgacccattgatttccatcggcatgcccgtactgtaattcccgatacttgggatatcccggatatacctcgcctgcccgaaggaaagaccagttagtagctccggcaaatccattctcatttcctacccaacggcagcccggccctccgtctgagaaaatcacagcctgcggttgcagttcatcgatcatcttataagctcgcgggtaatcatagtatgttttgcggtcgatcgtacgtgcgtctttcgctcctccgtaccaaccgtctcctccgttggctccgtcaaaccagatttcaaaaacatcaccataattagtgagcaattcatgcaactgcttatagaaataatctacatactccggcgttccataattggcttgatgcctgtcccacggagagagataaacggcaaatttgattccatacttcttacaggcatcggaaagttcgcgtacaatatcacctttaccgtctttgtaaggggtatttctaatacagtattcggtaagctgtgtaggccacagacaaaagccgtcatgatgtttggcagtcaggattactcctttcataccggaattgacaaatgtctgcacccattgttcgcagtccagacgagcaggattgaacgttttcggatcagagtcgccataaccccattcacggtcattgaaggtattgagaccgaagtgtacaaaggcatatgtttccatcttctgccaatttacttgcttttcctgaggaacgggtaaaatagcttccggtgccgaaacactctgacatcctgttaaaagtagactgaatactactgtagaaatactggttgcgattggttttctcttcatggtgttcgattcatttatagttttatcttttcaggttattttatttgccggtgctaagataggaaatattatattactaatcaaccggattggtacatgttatcttcagcggtttcattaatgcccgcccgttgatcacaggatagacacgtgtttcggtcggaaagctgccggaatattgatattcaacgggcatcacaccttcttcacgggctttcacctgacggggactggtaaacttaagatctgtattaccacctataacgacaaacataagctgtatatcattatcggtatcgtttacgtatttcagtttcattgttttcgtgccgcctttgcctatggtaccgaatgccattacttcgaaattcatccaaagtccgctaccgtactcatacggatagttctctgataccggatgtttgcagggaatgacggtgccctttacccaaatgcggttgtaattagcattgttattgctcaaaacaactacttctttactaaagaagcccggtcggtaggccgggttgtaagtcactttcactttacctgtagcattcggccggagcggttctttaggaaattcaaactgtacacaaccacagccacttgttactccattgatagaaataactttttgactgacattcttaaactcaaattcatgtgaaaccagtccattttcttcctttatttctccaaaatcaaagacacgttcttcgaacaccagttcgtcagaaagagtctgtgcgtacgaggcaaccaaatacaaattaatgcaacaaatcaatataataaagcgcagcaccatactttttttcatttaaaacaaaagcctctcataataactcattagctattataagagactttcatcaatcccgtttattcattctgatacatatcaaactcagacaaaacaatcccatatccactactatacggcaataattcaagtttgacatatcgagcactcacagctccatagaaacgaatatattgcggcgttgcacgagagaaagtaacgtttccctgatactcataatcttcacctcctgtttcacttgtatagacagcggcactggacaaactataattacgggaataatactgtaatcgaattcctgttatgttttggtatacgccattcaaattaacaataacggtagaactggcatcttgagacggataagtccttgtatttccgtcgaacagagttgttccaacatctacaccattgttagtggcagtccacgcgcttctatcactaattaatgtgccttccacactcgttgctcccggaacacaattcgtaaaagaggtgctaacagcgagataagcagaggaatgagtttcactcaatgccgcattcgataccgatgttacttttagcggtaaaagataacttgtattgacaaactcgctccactttccatcctctatttcaatagtaactgaatcagaagaaagcatacttcccgcaggaatcacgagttcttttttatccaaggttacttttaccccgtcagggaaagaagaaaattcacctatggatgcacaattatcaatatccaaagtaaccgttatatctttagaggcaactttagtagagcgtacccctaccttaactatttccggtccactctctaaactagagccaatcggtgttctcaacacttcatagacaaatgtattttgaggatattctgttgaagtccaacggttcacattaatatatacataattttggttgcttccttcgatatcgtaactttcgtcatcacaagactgaagactaaataatccgactacaaccaacaatcctaagatatgcgtatttattttcatagcaatcatttatttcgttactcgttacatctgttattatcatcactgtcccatgcaatagcactgctataattcagattatatgttaatccagctccttcatttatttcacgggcagtgttcgtccaatccatatcatagccatgtcctgttgcatctttaaagatgtgtccttcgccttcattcattttccagtatgcaaccaaaccttctgattgtgaatcaacgccacaaagattcatctgtagttcgcctgtactcaaagcacggttccagacacgaacttcagcaatacggccacgaaaatactgagatccgcgatatcccgtccacgacattcctagttcaaaacgctggaaatcgaccggtttaccatcaccatcgccttgtgcatctttcactccgtctacatacatagtcagtttactgccatcatatgtcaacgagatcatataccaacgatcagtgctaaaacgtgtactcgatacaatacttccacttggacttacccactgcaaggcattgatatctaatccattttctccaaatcgcagcatacttgagcgctgttcgtcagcagaagtgaaactacacagacgagctatacgatgccactcttgagaatagcatttgatctcataggtgaagttagacaattcctgtttcttatcatctgagaaaataaagttactataaagattcgtattgctgatattcaatgaggtgaaatgaataacacgagatatctgcaagaaaatagttttcgaaggttttaatatttcaagtccatccacttctaccatagtaactggaactacatatactcgcccttctgcaaagtcttcggtagaaataactttaactgtagcaggagtagaaaacgctttacctgcctgaatcacagcatcagcatcttcaagagtcacagcgccctccggaatcgcataatatttagtattatgttcattattatatgtctctaccagtgacctgtcaatggcaaacttcacatttacgtctttatctactttatcagtagtagaagcagtgacggcatacgaagaaggggtatcttctaccacaaacttggttacaggagtagtctctgtccctgtaataaaagccatattcttgttataatcaaacttatcaccttctgtacaacccagaatggataaacctaatataactcccaacaaagaatgtttaaatatatatgttttcatcatgattcttatttattcattgtttactcatttacagcaggattcattatctgaatagcctcccggaattcattataaggtatacccgatgaagaataataatttcttcctaagtagaatactccacaaccgcctttacggcctttcgacggttcccaacgtgcatagttcataagttgtcccccatcggcatagaatactccgaacgattcgcagtaaatcatcttctcgggtggaaagttactgggttgagtcaagaaccccacttgatcactataagcctgttgaacgatataatcacaataaggtatgatgtctgtcggtggtgttccactaaagtagtcaacgataagcaacttatccggctgttcgccttcaggaccaaaatacttgccaagttcctttatcaatctgaccaaatcggaaccactccaaccttcccagtcaacgtctactccatcaagtcccggttccaacacttgattcacaatccattttgcatatgcagccatcgcttcatcgtccttattctggctaagatcataatcaaccccatcaacggtaaactggtgtctgtaatgagaagcatcggcatgcatgacaaaacgtgtacccaatttccgctggcagtattgcatatccgcatatgctatcggatgtgtctctgctgtcggtattcccatccaaagatttacaatatctatactgtcaggtagtcctaccatacgttcaccccacgacgcgggatctttatagcctgtcacaccttcaatcggtgaccacgcttcgtaataagcataacttatctcatgatcgcttttcttgaaagcacgcagattctcaaaatactgctcgtcatatgttttcagcttctgaatttctaacgcttccacatcggtatcacaactatagaaaaagaatgttccgataaggaaagtcagtaaacctgttatttttgttttcatcgtaattagtgtttttagaattaaacaatgtccattctcctgttatcgggattttttgtcccaccagagtttagttccacccgtatcctgaccacccaaagccgatataccactggcaacgccgctagcattgttgatcttctcgtcgcgtgtataaggcagacggcggacttgtaactgggtatcaatcgtaccattactactgtttcttactacaggaataacttccggatagcctgtacgacgatattcactccagccttcgggaccgtcgggataattggcaatccacttctgtgtaatgatgcgttccaactgagcttcaaatccggcattatcatcccatgcaggagtaaccctgctgctgaaagtataattatcactacccacattgtctgcaaaagcacccggagtcgaagtatgatcagccaaataatcgtctacaccggcggcattattctcctcaaacgacatgcgtacaccttgctcatagaatgatttggccgttccacccatatcccagccacgtaatgcaccttcggcacgcaggaagaacgattcggcagccgtcatccatactaccggagtagaagcacggttaatattcagattagagattttattgccttgataattgctcatattgcttgttgtgataccaatacgtacgccatgatattcaccgtcatcggctgctgtaaaataagagctgattcgcgaatcattcagtccgttcaaataggctacgatggtagcacccggacgacagtcacccgaattgaagttataggcaatctcgtgcaacggatgatgatattccaatgaattatgcgaaagttcggcacgttccgctttactttcgataaagccgaacatgttttccatcgacttctttgcctgtgcttctgccagtgtgggattcgcatatgaaacacgtatagcaagacgcaaacgcagtgtgttggcgaacttcacccacttctctacgtcccccccatatacacagtcatagtcactcatcagcttagcatccacatttccgttcacataattgctcaatacttcgatagcattatccagttcttcaaaaaacttattataaaccaaatccaatgcgtcatataagctggaagagccatagtttacatatggaataggaccaaatgtatcagcaatacggtgcatgccttctacctttacgatggtagccaatgcgtcaacttccggcagttcctgttcagtggctattttgtgaatactttgccatggtgccataattccggtataggcataatcaaaagtggcattcacccattgttcctgaaagttatactgcccgttatgattggtagatcctaaggtagcggcaatatagcccgaataaaggtcatgcgataagttctgagcaatctgatagtcagagtcgagcttgtcgccatcatttatgattacaacccgacgcagcatttgcgaaaagaaagcacccgtcttcaagttgtctacttccatcatttcctcggtgacttcattcggatttacgttatcctcatagtcgatacacgaaatgttatttaatagcatcaaagatatcccgagaatggaaagtttgttccatgatagtattttatttaatatcatatcttctacaatttataagtttgattagaaattaactttcacagagaatcccaaattacgcagacttggcgacataaacatgtcgataccttgaaagtaagtgcctgtacttgctgtcagttccggatcgaacggagcttttctataaaggaaaaagagattcttaccgatgaaagatacgttcaaccccttaatccagtccacatacttgttgataggaatatcatagcctaacgataactcagccaaacggacattagtcgcactgtaggtgtacatagaaccaataccaccctgagcacctgcacctccaattttcgtatagtaatcttccgcaccgattggacgaccgttaacaatggctccgccattatcacgggcaatagctgtagcctttgaagagccgtatgcgtccatcgtcgcctgtgtctgtgatacaactacaccaccgacacgtgccgtgaacaggaatcccaatgaaagccctttgtaactgaatgtgtttccccaaccgaggttatacttaggagcactattaccagcctttacaaattcatcaggctgagtaactacaacctggtccgaaggatggacatagatagctccatgttcgtccgtgcgaagcgtattcacataaatatcgccgatagatccgccttctgtcagtatcattttatacatacttgtcccgcccatatcaattctatccaaagaagtaagttcgtgcgtataaggatcttcatagttgcgcagcaattccaccactttatttcggttcaatgaataggtcagatacgaactccagccaaaatttccccatttgtcctcaaaacgcaaagacaattcgatacctttattatctacacgaccgccattgactacttccgatttatagccggtagtagaagaaagggtacgttcaaagaactgattgtaggtacgtgactgatagatagatccatccaatctcaaacggttcttgaagaagacaaagttaaatccggcttcccatgatttggtacgttccggcttcagattggggttaggacgtcgggactgagtaacaggaacgccatcaaccaacgcataagtcggaatagccagaaatacatccggtgaattacctacttccgaataagaaatacgtactttcatgtatggcataatatccgtactgcaacggaatatatctgtgataatccccgaaagaccgatagacggatagaagaaagaaccggtattcgtccctttgaaggtagatgaccagtcgttacgagccgtcacatccagataagccatagacttgtaaccgatctgagcactaccgaatatggcgcgttttttcaaatgatagccatattggttggccagattcttctctgaagtatccacgttgccaaaagtaaagaggttggctaccgacttcagtttgcctccgaaataatcagactgataatcattgttttcaaagttcccacccacattagctgttacatttagggtattatcgacaaagtacttattaatattcagcaataattcaccgtatatctgttgattctcgatattactcttggagtaataaccgtatttagaagcaaacaaagtatttgttccggcatcatacatgcgctcacggcgttcgttgttgcggtccattttggcacgggctgttacattaatccagtcagcaaattcatattttgccgatgcagttgccatataacggttcttatgattaggtattttaatatgctcggtaatccagtatggattctgtaaagccagacttgtgctgtaaggccagtactgagtcagtaaatttcgttccgaatcataccgctgatatgcctgtactttggagaaatcatctcccgcaggaaatagataaagaggtactaacgggttataataaagtccctgagaggtcatattttgttcttttacagagctaagcataaaactcaggtcaagagtcagcttatctttcagcatcttggcaacattacggacagtgacattgtaacgttcgtagtcattattatggataatacctttggcattggtagtacctaaagataagtaagtctgattcttgtcagtacctgtagaaagactggcagcatttgttacattcacacctgtctgaaagaagtctttaggatcatagctgctcggcgtattcaatttactgccccagctgtagtaactacccacttctgtctgcccataagtattttgaaattcgggcaagacaagaggagcggagaaagtcgtattattggatatgctgactgaagtacgtccttccctaccttttttagtagtaatcatcacaacaccattggcagcggcactaccgtaaagagctgcagctgacggtccactcaaaacagagatactctctatatcctcgggattcagaccggaaataggatcaccggactgaccggcaccttcgtatgagtccgtaggctgtgtagaagcggcactcatatcactcatcgggataccatcaaccacataaagagcattgttattaccattcaatgatttggttccacgcatcactacacgtgaagagccaccgacaccagctgaagatgagttaattgtaacacccgcaactttaccgttcagattattgacgaagttggcatctgcaatgcgtgtaatctcggcattgcttacttgctgtacattgtatgacaaagatttagcttccttcttgatacccaatgcagtaacaacgacttcattcagtacttctgtatcttctgtcagcacaatattcagaacttgggcattctgtacctttactgttttcgtggcatatcccacataagaaatttccagaatatctcctttcctggtctgtagcgtaaagtttccgtttatatcggtgatagtaccgaccgtagaatctttcactttcacattcacaccgatcaagggatctccgccagcatctttcacaactccttttatttggatttgtccttcctgctgaacaagttgcattttattagtcgataaaataatctgcttgtcaactacggtatacgtaatatcggtccccttaaaaatatcatctagaatatccagaatcttacctgatttatttctcacagaaacaatacgattcttctgaatcgttttgtcattgtaaaggaaaacataatcggaagcttcttctattttattcagtacctgttctacagatacattgttcatagaaatggcaacatgcgtccgttgagcatagccattctctgcagatagttgtaaaacgactgcaaaaagtagtgccagactaatcctcataactaaaggtagttttagatttaaagcatatttaggatataatgcaataaatgaatgattttttttcatacatttgcggttaactaaagtttattactataatgaactgtggtttgattccggttagcgtttgcaagactccttaccgcgaatctgaaaaattgggggaagacagctgttggtagcagctttcttcctttttttacgatctttgtgttatctcataggctattctcatttttatggttactaatataaatctactattatctttttctttgtgaatgtatcatctgcctgttgtaccgcctcctcagttctccacttcaaggcagcagacttagccagataatccaatatctgtggcagtgtttcattacggaaggtcgcacgatatttatattcttttcccgatatattattaaactgaatatctacattaaaatgccgtgccagccgtttgaatatttcacccaactcggcattgcggaatatcaacttaccgtctttccatgccaccttttcataaacatccacttttcccttcaacaatttctgatctaccttattataaagcaatcgttctcctggagctaactgaactgttgtttttccgtccggtgaaataacgtttactttacccttttctaataccgtttctatactattatcatcttcgtaagcattcacattaaatttggttccgtacacatagacacttaacccggcaggagtattgacgtaaaaaggccgtttcctgtccgcttctacttcaaaataggcttcaccttttaattcaacattacgattatctttcttaaaaacggtaggataacgtaaagtactaccggagtttaaccagacaaccgaatggtcaggaagttcgtaacgaatgactgaacctgtagccgccatgacttctgcatacttctcttcagtatccgttgctccccaatataaatatcccaaaatcaaagaagaaagtaataaaggtatagtcaagaatgcagcataacgcatcaactgattatacatactccttcttctgtttgtctttatttgggtctgtgcttgttgataggcacccattacatcaatagactccatttccttaatatcctctcctaatgcctgcgcttttcggagcaatgattccggattcatattttccatattctctttcaaaatcttatcttttaattgcaattacactaatagtacaactgaggtaatcgaaaagggacaggtataacatacttttttttattttattttttaagctatcttattttccacagcttcataccaaaaacaaaaaaagaaagaaaattttaggaaatgctgattttcttattatatatttgcagtaaaatgaaaaactacagaatctcaaaataatgaaaatatctttttccagacagactaaagaaagagctttcaaacaactttacgaggattattatgcccctttctgcctgtatgcaaaaagatttgtagatgataaagaagtccgcgaggacattgtttcggatgtattcacctccctatgggacaagttggataccgactctttcgatttgcaatcagagacagcattgggatatataaaaatgtgtgtaaaaaacagctgtttgaactttctgaaacatcaggagtatgaatggagttatgccgaaaatatccaaaagaaagctcctctatatgaaacagaaacagatagtgtatatacacttgatgagttataccgaatgctatacgaaacattaaataagcttccggaaaactatcgcaccgtatttatgaaaagtttctttgaaggcaaaacacatgcggaaattgccgaagaaatgaatctcagcgtaaaatccattaatcggtataaacaaaaaacaatggaactcctgcggaacgagttgaaagattacctcccgctgtttttattattcctgtctcccgagcaactgtaagctctctgctaaaacacggcactctttacgattaatcttcccatttcccgtttgaggaatatgatttaccgtataaatatatttaggacgataataagatgctaagactgattccaatttagtccctagcgcacttatctccatctgcccttctatcaataaagtaacagcctgccccaaacgccgatccggaacggaagtgatcacaaacggtacagggatagacgactgaagtaacctttcgatctcttctgcctgcactttaattcctccgctattgattacattatcctttcttcccagaatcgtaaaactaccgtccggataaatgcgggcaatatcatttgtctgcagagtatcatcgcaaacaagcggagcattaatcatcaaagtattttctgaagacaaaaacaactctacggatgaaaaaggataataacgatcggatgctgctgcgccattcagacggcgaagagcgatgtgagaaagggtttccgtcatcccgtaagttgaataaacagcattggacagatttctgattttttcctctaaagccttgtcaactgctccgcctcctataattaaaatctccgtttgctttaatttctctttctcttcgggtatctgaaatgtattatacacctgcaaaggcaccatagccgcaaaccttaaaggagtgtccacatctgccaatggatgaccggaagcccgacgtactataagattcaacccggcaatcaaagaacggacgactaccatcatcgccccgatatagcgaaggttcatacacaataatgccgtttcaccctgctttaaatccagaaactcacaagtcaggcgtgcactctgtatcatctgatctttgcgaacaagcaattctttaggtgcccccgtagaaccggaagtatgtacagtgatcacaggatcatcattaaaccattcgtttagaaaaagatacaagtcccatatagcagaagggtggtttccctcaccttctgctacaaggctatgtatatcgcccggagtatattcctttccctccagcaacaaacgctgtttttgtcggtcgaatatcatcatttacaaaaccacaaacaatcttttctgatttcaagaggcatctctacattatctgtaaagagtaacccggtgcctaacccttgcggcaatggattctgaaaagtagcacaccattgagcgatagcattcagaccgatattagactccagagcagaagttatccaccaaccgatattcagtttctccgcttctgcaatccactcctcgccaccggctaatccgccatgaagagaaggtttgataataatatattgcggacggatagccgaaagtaatctttgcttttcttcccaggtattatagcctatcagttcctcatccaaagctatcggcaaaggagattcggaagtaagacgtgccatttcttcccattgtccggcacgaatgggctgttctatcgaatgtaagtccagttcggacaagcgtttcaatttctccatcgcatctgttggtgagaatgctccgttggcatctacacgcaattctatttctttagaagaatagtgagagcggatatgttggagtaaagccagttcttcttcaaagttgatggcaccgatcttcaactttatacagcggaatcccgcctccatcttcttctctatctgagcaagcattctattgaagtcacccatccagataagcccgtttatcggaatacctgcttccccacgtgagaagggtgtatcccacaaagcccagcttccttcaaaaaagtgacgaatggctgtctccaagccaaaaaggatggaagggtacttgcatagagcttccatgtccagcttacctccctgattctctacctgccggcagattttagccagcacttcctcgtaatcgggaagatcatcacagctaagatttggcagaggagcgcactccccgatccctacccaattgggaaattcgggagcagtaaaatgaagataccagacttttcgcgttgtgtatgtgcctcgtgaagttccggccggctgcttgaaatgaagcacccgcggaataatgtctattttgcaatccattgtttaagggaacttcggatatttcttaaagttaggtttacgtttctccagaaatgcattctttccttcctgagcctcatccgtcagatagtaaagcaaggtcgcatcccctgccagctcctgaatacctgcctggccgtccagttcggcattcaatccggctttaatcatccgcaaggccaacggactgagcagcatcatttcttccgcccattgcacatactcatcctccagttgctccaatggaactactttattcaccaatcccatatccaacgcttcctgcgcattgtatttccggcaaaggaaccatatctcacgtgccttcttctgaccgacgacacgagccagataagaggctccgaaacctgcatcaaagctacctacgcgaggaccggtctgtccgaagatcgcattctccgaagcaatcgataaatcgcaaactacatgaagcacgtgtccgccaccaatggcaaatccatttacggcagcaattaccggtttcggaatgctgcggatttgtttctgtacatccagaacactcagacggggaacaccgtccttgccgatatagccgccacgccctttcacattctggtcaccgcccgaacagaaagccttgtcaccagctcccgtaatcacgatcacatcaatatccgcttcttcccggcaaatgcgcaatgcgtcactcatttcagccgttgtagtcggagtaaatgcatttcgatagcgttcacggttaatggtgatgcgggcaatcccattatagtaatcaaagaggatatcttcgtattctctgatggttgtccattctctttgtgttgacataatctatttttgttttagttgatgataataatctttcagtatacgtgcatctttatttttattgctgaatacttccatcagaaccggttgttccatggcttccggttgtgtgaaggttttcatcgcttcggcaagctgttcttcattctctacccgttgataaaggaatccgcgttcttccgcccatcctttggcagatgtcttgtgaacggctgtaatatacttgtgcgatgtacccgacatatccagtccgggtaatgtatggaaaatctcccctcctccgttattcagcaaaagaatgcgtagattgggacggacattgatgttccacaaagcattcatatcataaaagaaactaaggtcacctataactataaaatttagtttatccgaaccggcggcatatcccactgccgtggacaacgagccttcgatgccgcttgtaccccgattacagcatacctcaatcgtagaaggaacctggtataactgagcatagcggataacagaactatttgccagatgcaatgcacatgattccggcaatgcttttatcaaagcaccgatagccgacatttccgaatatccgaactccggttcgggaatggtcttgcaataattctcccatacacggggatactccggcacgcggttatccagcaatggagctattttctccagaaactcaaacgggtccatttcgatgacggtagtcagagaaccgtaaaggtcaaccacttctccatcagcagacacatgccaatgttctttaggcggatgctgccgaagatattttttcaaccgcttggaaaccacatgtccgccataagtaatcaataactcgggagtcatctggccggttttctcttcgggcatcgcataaagcgccgcatcaaaattcttcactggaataccgggtactgtctgattaccgatatgctcggtcagccacacgaaatgtttatataacaatttggtatgccgtttctcaaacaagtaaatcaagttcatctgtccgacaataatcatccgcttctgatatctgttcaagcgttcgatcaggtcattgtaatcccggtcgtatacattcagcccctgatagcgcgtaatgacacgtacttcgggaagcgactccaccgtaaactggaacaaaggttcggatataggaatattaatatgtaccggaccttttccatgatggttggtttccagcaaggcttcattcaccaagcggttacagtaccattcatcctcttctgtctgaatctccggaaggtttaccgacttcttgaccaatgtctgaaaaacaccgggctgcggcaatgtctgtcccgccatctgtccaatccaggcagcaggccgatcggcagagataacaactaaaggtatattctgataatacgcttctgccacagcaggatgaagattgagcaacgctgtaccggaagtacagcaaacggcagcaggatgcccgccattcagcgcaagaccaatcgcaaaataaccggcactccgttcatccgtcatagcataacaagtaaaacccggatgagtagacagcgtatgcacaataggtgcattacggctaccgggacataacactactttcgtaattccatgcgcctcaagcagcgcgaccaactggagtatatttttcttgtccgaatacatattgatagtgattagcttgttagtgattcatcattattggagcagatacaagaatacgcctcatggtctgcaatttcttttccgtttcctgccattcatcattcaactctgaagaggctaacaatccgccaccggcatacagtgtcaattgctcgtcttcaatgtgcatgcaacgcagattcacatacaaatctgtgcgtccctccggatcgagccaaccgataaaaccggaataatacttacgatcgtacccttcattttccaaaatgaaccggtaggcttcttctttaggcagtccgcacacggcaggagtcggatgcaggactttcagaaggtctcccagatttttattatctttcaaagagaaatggaaatcagttttcagatgtgacaaggcaccggcataagccggataaggtccgctctctgtggagcgaatgcccagcgaaagaagctgccgacggatataggacgccacataatcctgctcctgacggtttttgtcatcccatacttgcggaagtttaccattctgcaaaggttgagttcctgccagggcaactgtgttccattcatttttttcgcccgacaatataatttcgggagtacttcccagccacacgcccgtctgaggagtataacacagatagatataggaatgaatataacgttgacaagctgcacgaaaaacagctgaaggggaaaactccggattctttccaatagtgagactacgggaaagcaccagtttatcaaaggtagcatcacgcaaggcttcaataaatgtatgaaaacaggtcgcatacttcccagtacaaagggtatgaaaagattcctccggataactttgcaagccctgctcttcctctgccacgatttccataggcaacggttgtccagtcctgtcggactgtatcaacacaatcggacatgacttatctacacggaacggagcaatcacaaatcctctttgtccattcagttctttcaaatcgaaaatcaggcggacagctccgacatcttctgtcaacagacgaggatacttctccccgggaacacgataaacagcaaagggctgtttccgctgaataagtgcatcaatagttgtcaagttacttttttcgtcaatcatctttttttcatcacactgttgaccacccgtatagaggacaccagtttattggttgaagtaaaaacgtccacattccatacatgggaggaacgtcctttgtgtacaatcgtcgctactgcacgtactgtatcaccttcgtgcgcagaagatatatgatttccgctgacctgcattcctaccacaatttcatccggctgacagagaatcatcgagccgagtccggcaactgtttctcccaatgcaagcgtagctccaccgtgcaaaataccgaacggctgacgggtacggtgatctaccggcatcgtcgcctctacacggtcttcgtcggcatatgtatattggatacccagattacccatcaatgcgtgacgcgcctgtgcattcaactggtccaaaggaatctctgcagcgcgaacttccgctattatcgccttttcgacagccagagccactccgtcttcctcattggaagctgtcacataatccgcacagacctttaccgaatcctgcgaatgccccatcgccactcccagtcctgccagctgaatcatcgttacatcgcacacaccgtctcctatagcgatgacttcttcacgcttcacatccagttcttccaataaagctcccaatgtgttggctttatcaatcgcacacggcactacttccagaaaataaggttcggaacggaaaacatccaaagctccgttcaaccgtctcttccagtgtccttccagactaaccaacgcttcctcgtcatcgctgacaagcatacacttacacggagcaaagtcaattgctacagaaaattcctcttccttgatcactttcaaattattcaagcgagcttcattctggatatgttcattctccggagtgtcagtaatgatcgtatcatcatggtaagtgaacagtgcgaaattattttttcttgccttcttttccagataaggcaacatttccggattaatcctccgctcaaacagtatttctccgttttgagcattaattatctggcaaccattataagaaaggatataacctccataatttccgagttctagggatttggctaaaggcatcagaccgtaagtcggtcggccggatgccaacacgatacgtactcccatctgctgaactttcagcaaagcagccaatgtacgtttactaatttcttttgcatcattgagaagcgttccgtctacatcaagaactaataatttatacttcatggacacacgattttgatttagattacaaaggtaggaaattgagtgaacgactgaaagcggaaagagataaaaattactttaatttcactctttcagatgcatttccaaataatcacgaaggattcgggcatgattataaaccggttctttggatgcataaagcaaagtgatcaccagatgaggtttgataagagtcagaaaatcggcaacagcttgagaagcttccagttccttctgatacattacgacaaaatcattccagtgccccggaatatcttcatgaaaccatctgcgcagtgctgcggaaggcgttatatcttttgcccagtaatcatatttcaaccattcttttttgattccacgtggccagagtttatctaccagcacccgatatccgtcggtctctgaaaagtcttcgtacactcgctttatcctaacttgcaccatttccgtttatatttagttatcataagaataaaccgataaaacggaaaattgtttatcgaaaaagccaaaatcaacctaaggattcctgcgcttttttaaattcgtaaggagtcataccagtctttttcttgaacatactgtacagaataggcgtactattaaatccggcttcatcagctatcgcacgaatggtataattgggatgttgcttcaataactgaatcgcatagttaatacgaagttcattaatatacccgttgaaattagttccggtgttttccttgatcatccgggcgaaacgcgcattattcaaatgtacaatctgagccagatcctttctcgacaattccggagacagatataactgatcctgaacaacaatacgattcagttctttgaaaattttcttattctcatcctcttcctccctactctccactacttcatccggagataaatcgtctttttcggaaaagccagtttccggttccaagtccaatggaacagctatcggatcttccgcatctccatctatgaataattgtttgttctctacttttccagccagtttctcattgataaactttgccagcattttgtttttatatttaacaataatcgtatgacgccaaatccgccatagcacaaataaaatgagacaagtgacacatcccaaaaaagcaagtgatatgtttctgattcttaactgtaaagtctgttcggcaatatattcttcctgctcgtcagctttatgaatagcatttaattccaaagccgcattctgtttatccttgctgttaataccatcaataatagaaataatagactcacgtaatgctgctactttttcaaaatccttcaagcctttataagctttcacctctttctgaaggatactaatatactgcaagttgacagtatcctgctcttgcatcaatttcttaaaatcctgacattgatcaacgactttctgatattgtttagacactagcagataaggtatcgcataggtttttccatccggtgtctgtgaattctctgttgacaaatattgttgataatatttttccgcctgatcatactttccttccagatagcagatatacgacatttttgcatacaagtaagtatattgcagatcaagaaagccttttgttttttccggtaatttagctatatctttaagtagcttttcgcgcttcaacccaacctccaatgcttctttactacgggaatcattgagcagataatccattttcatcccataaaagtatgaaagcatagccatttccaatttggaacttgtaccttgaagcaatttgatagctttgtcaaaatagtcatatgcctcctctttgaaagacaattgccatttattttcaccaatgcaaaacaacagcttactttcagcccctttatccttttctttttgtgctagcttgataccatcaagagcatacctcatactctctttattgtcactcataagcactgctaattctgccaggtcgacagtcatggtcaacaagtgcttagtatctttctgagaaacggaatccagcaaataagactttttggcatacaaaaaagccagtttagtcatatacatattacgataaaccctgctgcgtaattcatgtataatacgcagagggatagtcttcttactttcagctccatccaacaaacttaaagcccgttcaggttctgccatataaattcgacttatatactcactggtatatagcgaatcattctctatagttttgtcggcgaaaaggagctggttaaacacaaacaaaaacaaacaaaaacaaataaccgagcgaatacttttcattataatcccaatgattttactccccaaaagtaaaacatagtttcataaaatgcaagaattgaacatatttgaatgaactaaaataagaaaagttagtgattataaaagtcaggagctatcaagttttccccaccaaccacatacaataaaatactaaaaatcaagcatatgtcacatacataaaacaaaacatctcaacatataaataaactgccgattctattaatgaatctgcataagatcagagcagcacatgaaaaatcgaaccgaccagtctaaataaacaccagacaattattaacccgccacactcatcagagcaaaacagcacaaaaacagaaaatcaaaaaagagaaacacatactgtaataagaaagattataatcccaacgctttatcaaaccgttgctccatacatgcactcaaatccgtcgttacaaactttcctttatagaaaagagaaaagatagtagcaggtgtaggtgcattttgtgcttgtgccatcgtttccaatctgactatcttcaatggaatacctttgttctcagtcacactcactaaagaattacggacatgaaactctgcaaacggacaacgatgtgtataataaacgactacaccttctttttcctcacattctccacttgatactgttccattgaatgacggatcaggagctgccggatttatcttcaaagccaaaagactgaaaccatagggtagtttttctatcgtctcaaacccctgacgtaataaccatttcgcatcacccataaaatgaaatttagaggtaccgaccacagtcaccaagccatccctaccctgtgctttggcatcctcgacagcagactgcaatagtgctttgccatgcccgcatcctttatattttcctgaaacccaaaaacagtttatcattaaatagttaggtgcattaaccggaacccaagctttttcggcaggtccatattctataaatacttttgcacgttcgtcaagccgtctgaaaacatagccattctcaaactcatttttcagccatgtctttttcaactcatagctatccttacatttcttatcggagaaagcacagcaaatatgttctttttcgatattctctttagtcagagtgatatacttcgcttccataatattctgtttattagtatataaattccggttgtccatttcaactacagcaaagatacacaatcgaaagtaataaaacattgtccagtctcgtcaaaatgacacagtagtacggattaaagttcggaaaacagataagtaaataaacctgagtgacaaacttatcaaagaacttattgaccactctgtggaagaagtgatcaaaaaaactccctaagaaaaaacaggaggaatatcgcacaatgatttaacataaagcgtgaaaccgctgactggtaaccatacaaatatccggctttgctgcaattcacaatagtaaagccggatatttaactgtcaaaagcatatatcccatataccacaagctctttccaatgctactagtgaagcggcatatcctttcattgtttccagatactcctgttgcacttcattataagtacgctgggcaaccagtacatcaagaatactcgtttctccccgtttgtatttatataccattccgtcgagcaccttctgcgagtcttcaagtacaccggctttatattgagctatctttttcttttcagcctcatagttgaaccaggcctgggttatctctgtctgtatctgcaattccatatctctttccattatctccgattgggcaatccgaaactttgcagcttttacagctcctttatttatattcgagaatgtcagaggaacagatacaccggcagtagcagaacgggacggaggaagaaagccgttccagtttctttcataagaaacagatactccgatatcgggtctgcgttccgctctcgtcagtttatattcccgggtagtaacttcagtacttttttgagcaacaagcaggtcgatgcgattatccagtcccgctttgaccaaatcagacagagcaaagtccctgcttagctcttcccaatttcccaaagggatatgaagcgtatcagcactcatccccatgtgtttattcaacaaaaccaaagcggaatgataagccgcctcctgactgtaaacagtattaagcaaggtgacagtttccagttttgactgccggacatcattctccgtaatctctcccgaaacataacgtaaactatctgactgactcagctgatacatatactcataagaacttttctgtacttcaagtaattcgcgctgaagaattgcttctagaaaaaggtcggcagcctccgccctcaaatcctgaaagccctgttgcaggaacagtttctccaattctgcctgagtccgcgccaacttaatacgtgctccccttttatttcccatttctaatgaataggaaactcccaacgagaaagtctcattacctgcttcaaattccaactccggatccggaaagattttccgggcaattacttccgcatcagcaatactcacattgagtttttcggctaaataactcaggttctttttccctacccgattcagatattcttcgaaagaaatagactgcccctgctttatttcaggcatttgcgcaaaagtcggaatgagtacggcttccaccattaaaagcaagagcactatattatatcgtatattctttttcatcgttcttctttttatttaaaacattgttctcaaccagataatagaaagccggaagcagaaacatagagataagggttgaaaacatcaatccatacacaatcactgttgccagcggacgctgtacgtcactaccaattccggttgccaacgaagccgggaaaagtccgagtatcgtagtgaccgaagtcatcagaataggtcggaaacgctggcgtgccccttctatgaccgatttccggagttccattcctcccctgcgcagcccattgacctgcgataccatgataattccattttgtatggaaagcccgaacatcgctataaatcctacggcagaagatacattcagcgtcataccacgcacattaagagcaagcatacctccgaaaagtgccagaggaacaatagccaataccagtcctgcctgccggaacttcccgaacgtgacataaagcagtataaacatccctgtcagtgtcagcggtataatgacagcaagacgtgtataagcccgtttttgattttcgaaggcccctccccatttgatggtatatttattcttgtcataatgtactttctcattgatcgtattctgggcttcattcagaaaagatgtcaggtcacgaccgcgcaaattcagctttaccgtcaaatggcgtctgttcatttccctggtaatcgtactttcgccgacactcaatctgacatcggcaacctgagaaagaggtatctttgcaccggtggaagaagtcaacataagtccggctattttctccggagtattccgcgcttcctctttatacttacaggtgatgccatactggcggtcaccctgataaagttgtgcgatagctttacctccgacagccacttcaatcagatccgctacatcggatacatttaatccgtaacgagctatggcatcacgattcatactgatctgtaactgtggcaagggtggttcctgatcaatatccagatcaacagcccctcgcacagttcctaatgccctggttatttcttcggcaatacgacgtgtttcacgaaaatcttcgccatatactttcaccaccagttcactatgggccccggctatcttatccatcaccccgtctatcataggttggctaaatcctactttaaaaccgggaagtaacttatattcttcttccagttcatgaatcaaatcctttttagtttttcctttcggccattcatcataaggcttaataccgatggacacttcaaaatgtgaaggggtgaacggatcagttccgtcgtcattccttcccgcctgtaccataatataagttacttcggaatacttcatcgtacgggcacgcaaagtatcagataactcccgtgacttttctacggaaattccgggtggcagattaacctgtaaccatatcgaaccttcatccagctccggaaggaagtcttttcctacgacaacactcaacacgatccccgctgtcagaatcagtcctgatggaatgatggcttttaagggagcttccagaaatcctgtaatggtacgaatgtatttatcctttagtctgtccagccatttattcttatatattttatgtggtttacgatagattgcataggcaagtcccggaatcaataagagcgcaaccaacagtgctccaatcattgcatagctcatcgtaaatgccattggagtaaaaagtttgcgttcaacacgttcaaaggcaaacagcggaaggtatgccgtaataatgacaatggttgagaaaagaataggccgacccacttctttggcgcgttgcgccatgcttttttcttcgagatattgtttgggattatcctcacgtttcttaaggatcgtttccagcataacgatagcgccgtccacaataataccgaaatcaatagcaccaagcgacagaaggttagccggaatatccgtcagatgcataagaataaaagcgataagcaatgacacaggaatcgttatagataccaataatgcaccacgccagttgcctagaaacagaataagcacaagaaccaccaaagccatacccatcagcaaggtatgggatacggtactcaaagtagtatccaccaagttggtacgatccagaaaagtatgtatcctcactccttccggcaatgtctcattatttaactcatcaactgccacatgaatatcttccagtactttagacggattctcatgtttcagaaggagtacaattccttccagactctcagagtagttgcgggtacggtccgtatatcccagcactccctttctttcaagatttccatacttcaaagaacctatatcattcagaaagacaggaactccggaagtagtactcactacaatatgtcccaaatcgtccaaatttccgattaatccaattccccgtaccacataacccaagtcaccacgattcaacacgcttccccccacattggcattgttattctcaatggcttcaacaacctggctgagagataaattatattgttccagtttggacggatctacttcaacctggaactgagtagtgatcccaccgaaattggttacatcagccactcccgacacttccttgatacggggaataattacccagttctgaaggtcggttaattcgcgtaatgagtgctggtcactttctatgatataacggtacacttctcctacgggagatgtcagcggatcaagtcccggaacagctccataaggcagttctacttcattcaatctttcctgtacgcgctggcggctccagtagtcctctgtcccgtccttaaagacaatggtaatcattgacagcccgaatgtactcttactccgcatgacgtgcataccgggcagcccattaatagcgcgttccaaaggaatggttatctgctgttccacttcctccgcagccagtccgggaacttgagtgaccacctgggaagtgacatctgcaatatccggatatgcttctatcgaaagctgtttccatgagtaatatccaaagatacacatcatcacaaacaggcaaagcattacccatcttttttgtataattgaaagcattaattccttcttcataatttcttactttaaataatatcctccttcactgattatcttatctccgggacgcaatccttcgctgatcaccgctattccgttttctgttgtctccactgtcaccgacgtccgtacgaaaaccaacggagcaatctgcacaaatacatagctatccttttcgccctgtagtaacgttttctccgggatttgaatttgtccgaccggaacactcagaaagtggacagtagtgtacatccccagcttcagatgtccgttcaaattatcacagaccgaaagtacctgaatggaccgggtttcctcgtctacctcctcctctacatgatacacattgcctttaataaccgtaccgggcaatgccgaaatttcaatatccagactactgccttcatttataaaccggatatctttctcctttacctgagccgcaatccataccttagacaggtcggcaacaatagctatcggttcggtatcatctttcagatattgccctgttacgatgttatcctttatcacttccccgggaataggagaacgaacaatcatcggttgccccaatatcatttccgccggattgtccacctgatatacccgcaatgcggcagaggcgttttcaaactccttatctgctatcaataaagcattctgggcttcttccagttctctttgcgaactgacaccattccttatcagatcttctttgcgtttcaaatcttttttagcaagttccctggacgaaagtgcctgaaagtattccttttgtgcagaagtaaagtcgggggaactgatttcaaataaaggtgttccctgacgtaccgactgtccgatacgcacataagattttgtgactctccctgcaaatggaggagcaacataagcataacggggaggaatgggacgcaccacaccggacgttatcaccttcttggaatagggtttcagttcagacactgatactttgatcttttcaagtaaaagaggatctgcaatatagaccgtgtcaccttgtatacgatagccacttttttgctctgattcctgtttatccccgcatgcggtaaaaaacaacacactgccaataataaatgtgtgtaactctctcttcatcatcataattaaacataagttaagttagtaaccggatttccgggcacaaagatagacggctcccttcggagagcctgttagagaatagttagaatcctattagaatcttattagagtaaataaagatttcttcttaaaacagcagttttgttgttagagagtacgcacaaataaggggttgactaaaaagccaacccctcaacggatgatattccggtatttttatcgtaagccgaaaagttcttattctttcacacaacgtatactttgagcaaaaccttgatatgacaatctgaaattatgagaattatatgcagactcaagcgaccaggctccataacgtattctcctgtcataaggtggattctgcaattccgatctcatataaggaggacctacacttgccgaccaatagtatccggtactacccctactttccaaagcaccacttgtgttattcagacgaccggctgacggaaaaaagacagatgcattcgttccggaatcgggattaaaatacaatactccctgataagcaacattactatttcctaatgatacgccatagtttccattcgaagcctcttttatcggacgtctgtcgaaaaatccgtccgaataaaatgtataagttgttccttttagttgtttccgggcaagcatatctttgtttgctccgtaaggatatgtcccaggacctgtattaccagttccaccaaaaggagtagtaaaagctgtagcgtagtctgcacttgaagccgcatttcctgcaaaaggtacattaaataaagaaacccttaattctgaatactctatttgatctttataattcgtggcagtacccgtagtaccctcatccggcaaataatcataatatccattataagatattttatccgtatagccatctgtcggacgacgatatcccggagggcaaacttcaaactgttctttatatgcaggaatattagcactgacatctccatcccacatgatcggaaattccccatatccccaagggaatcctgaaacaagatatgacttcgagggattaaaagctctgcggtaataatcagtcataccggaagtagtgcctttcaaatcgaccgcccactgaaagaatgcacccgcctgcgaagggaagtctacaaaacgagcaccttttacgttcacattctcataatccggattcgtattccctgctaacctctcgcttgtcaggtttaaagcagagaacttagctgctcccctacgggcattcgtcgataaaagacgcatatcttctctcacatgtgtagtaatatccgtacctccattccacgctccccatacagttcccggaatagcatcccccggcgcatatatataagcaccggcttcgccctgacgaatataaattttcattgttgtccgccatcccggataatatgacaaattgatatatccaaatttaggatcggattctttagttggtacaaaatcggcattttccttaacgccaatacggaaatatatacgaccggtgagacctgagatactagtaccatcttctcccctatacggattgagagttaccggataatgttccgcatcacctggtgattctgttccaatattcggatcaaagctgggagtcgcgctcacaacaagccagttttgataggcaacaggtacactaacagaccatgtttgatccaatcgatgctgtcctgttataatacgttctcctttctggttatgtttaaaaaatgctgcattgaacaaaccatgttgatttgccgtaggattgtgcacaaatcgcaaaccttcttgtgtgacggtaacctttatcttcctctgcaatgcattcttaccattagtatcctctgctgcagataatgtcaatgtatatgtaccactcatattctcggtcctgtcatgcgtaccaaaaccggtggtatttgttccgtcaaccagtaaatccatatatccgctgcccgaagccgaatcataaaagaaacgataaggatcaggattattatcatctactgccaaacagttaaagactgtattagttgctctttcattcgcttcaccttctttctttactgtgcccaacaccttcactaccggcatattggaccagaaagaaatccggactccgttcatatccgtcatcttagcctgtatatgcgatacattcagaacacggacgcctgatatttcccaatcatctccatcgtcaatccacggagaaggctgtatatttacttctaaaggttctcttatgatacctgtcaaatcaagtttcgcatttgccggtaatgtataatccgggtcggacagaatcttcaatttgcaggaaggactatacttgtcaatcaggttaacagtaaaatttatcgcattcgtctcgtcggacttcgatgaaaagaagctagatggcagaattacttttttaactttaacagcccagactaaatcgttatttttatcctcagtggtcaataaagtgggatctattttaaaacagtcggcattatcagctaatgtgagtttacgttccacatttctggttatggccgttccaccataaggaagaaccggatcggcatacgcccaggaactgggtaaacaatcactaggcaagccatataccaaaggcactctatccggtatattagaaaaagtaattccttcaaattcactcgaactggcatcaccaaaatcgactttcgatttcaaaaccacatccacacgtgccgccaagcgtctgagtcctactgtcaacttggtagatgcaacaccatttacctccaagtttccatcagccagcacttttatactattattttccgcaatcataggtataacccgttccgaatcgaagaactccgccggataggatattgactttagtgcatcataatcagttatattgtcaagaaccgccttcacaattgtattatgaggttcattggccaaaaagacaaaatcatattcacccttattaatcggatgccgtagcgtatttccgcccagcacatctccataataaaaagtattactttcgcagatgcgacttgtcttattgaaagccagaatacgcagagtttcaaccttatcatcgagcccgtcacccggataggctcctgtataggcacgtgtattgataccggtaattgttatatatccctctttaggtgtatctttataaaactcatcaacacaggaggaaaacaataaaaatataaccaaaaacgacaaatgtaaatagtttctcaatctaacaacaaacatatattcccttgatttgatatttcctagcactataatctcatactacaaatatcggcatatcaaagaaaaggagaaaggagaattaatactcatatagaatatacagagagagaaacgactctattatcgaaaacaacaacaaatccaggcacattataacaaataacggtcttaatcatcaatattttttcattatacagataatcttctttaaaaatatccgtttatcgaaaaaacaaaatcagctattccaaaaatcgccaagccaaaattctgctattttttgtaccctgacacattcgaattatcttatattccgatacatggacggcttttaatttagcatatagtttatccagattcttctccttagaaaccagacttgtaaaccaaccgcaattcttccggtatttccggctctcagaaatcatattcagcaaaaaatgtaattctccaccctcacaccaaagttcattcgcatttccaccgaaattcaatttggttttctttactttctcccctttcagactactcaatttacgtaatgtcccctcttctgcttcttctttcgaactgtgaaacggaggattgcaaattgttacatcaaaatattcatcgggagcaatgattccgtcaaaaatcctccgattgtctttctgaagccgcaaatcaatcttatgtgccaatacaggattgcaagtcactatcttacgcgcattttctatagataccggatcaatatcggaacccacaaacatccatccatactcaacgtgcccaataatcggataaatacaatttgcaccgacaccgatatccaagcatctgcactgtcgttttggcttatctccattctcttcatttgccgtattactgactctctccggatcaattaaatcggcaatataatgaacatagtctgccctcccggggataggcggacacaaataattccttggaatatcccagtagcggataccataataacttatcagcaatgctttattcagcgctttcacagcatgtggattaaaaaaatcgattgtttgtattcccaaaggattgagaagtacaaattttctgagcggtggataattctctgtcaacaatgaaaaatcatattgcccattgtgtttatttctcgtatgtagttcgcttctttctgccatggcgacaaagatacagagaatctttctgtctgcaaatgactttcatacaaatcatgaagatacctgattacaactgtaacaagcatcttcataattaattatataaataccatatacctaatccttcttcacccaaacagccaggttacgggattcgacagagaactctccatttccttcttcatctaaagttatttcttcggatatacttccggttatttcgtgccagacttcgcctttatgtttctcacccaagctcattattttacttcccgcctcgtcattagacataaggaagaccagcccggagccattatgttcctcatctcctgtacggataaagccaatcgttgaaggatggtcgaagtattctatctgatcaccgtaagcgtactttcgtctcgcatccaacaatatatcaataatccgggtatgaggagacttctccccctttataccataataatctccataaaacagacatggataaccttccttcatcagcaaaatcaaaccataagccaacggtttaaaccaatcttctacattggattcaagagaacttccgcgttgcgtatcatgattgtcaacaatggttacagccagatcgggatgatgttcaaccagagtatcttttaaaatatcccgcaaatcatagtctttaccttcctgtgatgcctggaacatattataatgtaacgggacatcaaataggtttactttgtgcccaacagcttctatataagcatccaatgcttccaggtcaccattccaatattcacctacggcataaaaatcattgcctctttcactcctcaccgcatcgaggaattgtgcgacgaattgatctttcatatgtttaatggcatccagacgcattccgtcgagattcaattcattggaaacccactttccccaacggttcaattcagatacaacttccggatggtccaagtcaatatcgttacataacagaaaatcataattaccgttttcactatccacgccctcactccaagcttttccttctccctgtatctgaaaaacaccgctgcgcttttgcgcatcatcaaaacccgtcccggaaaaatgataccaatgccatttaaaatccgaatgtttgtccttacgtccgtgaaaactatacccggtccacccttgtatctcaaacggctcacccaaagccttggttctctccttgggatcgacctccactaccataaacttttcagtaaaatcaccacccgctttatgattcaatacaacgtccagataaacagcaatatgatatttgtgcaattcgtcaatcattttcttcagttcatctttcgtaccatatttagttcttatggttcccttttggtcaaattcgcccaagtcatacagatcataagtcgcatatccttcgtcttgctgctcatcggccttataagcagggggaatccaaacagcagtcacacctatatcacgaagatgcgacgcatcttcctttatctgtttccataacttcccgtcattcgggagatgccattcaaaatattgcatcataacaccattttccatacgcttcattttttttataattaactttatacaaaacaaagatgatgttaacaaagttcctacgtttctataaattataagctaacaaatacaaaaaagtgcaaaggataaaaagctgatttacaacaccgtaaaattaccttaattattcttttattattcatatttatcagagcgtgaacaggaatttttgatttcacatttgttttcagtcataccataacggaataattcggttcatttattccacaacataattattttttttatatagtattaatataaaattagaaaatatgagagagttgaaaaatcatccgtccccggaccagttggattcgtatgacaagtatccgtgctattatgagaacgatttggaattagtctatacaccccagcaatccatatttacgctatgggcaccaagtgccgataatgtccgtttaaacctgtattcatccggcgaagcgggagatccggaagaacaactggaaatggacatagccgacaatgggacctggtgtatccatatagaccgtgatctgaaaggttctttctacaccttccaaatagaaaaagatggaaaatggctggacgaaacacccggtatctgggcaaaagcagtcggcatcaatggcaatcgcgctgctgtaatcgactggaacgagacaaatcccgaaggttgggaatcagaccagtcacccgaactgaaaatgtattccgatatcattctttatgaacttcatcaccgcgattttagtattgatccaaactcaggaattgaacataaggggaagtttcttgctctgacagagaccggaactaaaactcccgaaggagaatcttccggactggatcatttaaaagaattgggagtaacgcatatacacatccttccttcattcgatttcgccacaatcgatgaaaggaaattggagaaaaacaaatacaattggggatatgacccgaagaattataatgtaccagatggaagttactccaccgatcctgtcacccccaccacccgtatccgcgaatttaaagagatggtaaaaagcctccatcaaaatggttttcgtattgtactcgatgtggtttataaccatacagcctcaaccgagcattctaattttgacctgacggttccgggatatttttaccgccagaatcccgacggttcctattcaaatgcttccgggtgtggaaatgagacagcctcagaacgcgaaatggttcgccattatatcattgagtcggtcaaattctgggcgaaagaatatcacattgacggttttagattcgatctgatggggatacatgacatcgacaccatgaaccagttaagagaggaattattaaaaattgaccccaccatttttgtatacggagaaggttgggtagcagcagattctccattacctttcgagcaacgggctgtaaaggagaatgtacgaaaaatgaaaggtatttccgtatttaatgatgaatttcgtgacggtctgaaaggaagtacctttgacgaacaggaaccagggtatgcctccggaaatatcaacgggcattttgaacctgtcaaatatggaatcgttggcggaacacaacacccacaggtagattatagcgggttactttactgtgacggtccatatgccgctgctccctctcaaatgattaactttgtttcctgtcatgacggatatacgctggtagataagctgaaattatctgttcaaggcgaacattctgaagaagaactggttcctattgacaaattaatacacaccgtgcttttaacctcgcaaggtattccttttattcgtggcggtgaagaaatcatgcaggacaaacagggagagccaaacagctacaagtcttctgacgccgtcaaccaaatagactgggcgttaaaagctaaaaaccgtgatatattcaattatatcagaacattaatcgcactccgcaaaaaacatcccgccttccgtattcctacagcagagggcttagagaaatggcttcattttcttgatacaggcgattccggtgtcatcgcttatactctaggcgagtatgctaacggtgatgaatggaaagaaattctagttgcatacaacggtaaccggaatcaggcagacatcaatatcccggaacaagattggattatagtctgccataacggacaaattgatctagacagtcaggagcatttatcgggaggggatatttctatcgcagcatcttcagctcttatcttgtatcgtcaataaaaaggagatcaacttgatattattaaataaaagtacaattataaatcagttagactatgttagaaaatgaattatggggaaatactattgaaaactggggtatttccattcttattattttaggagcaattattattgtgaaattattatcgctattaggcaagaaagttatcaaaccttttgttacgggaaccgacaatcacctggacgacgtcattttttactctttggaagcgcctgttaagtttgctataattctgttgggaatctggatcgctatccatcggttggtttatccggacagttttgtgaaagtagttgacaatgcttacagcattttgattgttctggatattacttggtttttcggccgtttgttcagtagtttacttcaggtttactggggaaagcagtccaacggacaagctaacaaaatgatgccaatcatcaaaagaaccatcttggttatagtctggctcatcggcatcgtcatggctttgagtaatgtgggagttaacatcagcgctctgttgggaactttgggtattggtggtatcgcatttgctttggcagcacaagatacagtaaaaaacgttttcggtgcgtttaccattctgacggataaacctttcagcatcggagacacaattcgcgtggatagttatgaaggaacggtagtagacgtaggagtccgaagcacaaaaataatgaattacgacaaacgtattataactttccccaattataagattaccgatacttctatcgttaatatttcatccgaacctatgcgccgagtagtcttgaatcttggactgacgtatgatacgacttccgaaaagatgaaagaagctttagaactattgaaatccatccccaaaagagtagaaaatgtatcttctaacccttctgatatagtcgctgtttttacagaatactcagattccgcattggttatcatgtatatctattttatagagaaacaaggagatattttaggcgtaacctcaaatatgaatatggaaatactggctgcttttaataaagcaggattgaaccttgcttttccgacacggactgtctatattcagaaagacgaatcattgaaacaagaaagttgataaacccatcgttctcttagaaatatgtacatgcagcccaacatcaatgtgctatttttaagattaaacaaaaatacagttgaaataaaaatagtaaaacaaagaataaagcgcataaattagtgcaataatatacggaataacagattattattgcataaattcacatgagatatgcatctttttctatcactaaaccactcgttggtcttaaaggaacgcctccttggtttaaaaccaacgtattcttcctcaccgaggaacctgtttttcctcggtgaggaagagataaaaagactatccggagcttgttttcacgctggctaatcacaaatagcgaaaaggcaagattaaacaaaaagttatcctttcagtcaatacatcatctaaaagaaaacataagaagtaatatcatatcaatctattcagcatacaacttaaataaaagaaagagagattttcattcaagcaaatgcaggcgtttttctacttcttatttatccgtaatgtaatttacagcattccttggctgattaaatattccttttttaagaaagttctttttttcagcaataggtaagcctgagcaatagttaacgaacgactaacaatacacaaacgatcatagtaattagtaagtctgcaagatcttttcgaagcagctttgttgcctgttgtatacgataagcaattgtttttactgaaaccccggaactctcagctatttccttatagctctttttagtaaaacgatgcataacaaaagcctccctataggaagcaggcaatgcatctatagcttctttcactctttttgaaagctcttggaactggtaagtctctgcatcatgtatcagcttttccatctcctcataatacatagtatcagcatgattcttcagctgtttttgcttgatgcagttaagtgatctatggtaaaccgatttgagtaaatatctgcctaaggaagtttcaacctgaagtgtttcgcgatgttcccacagccataaaatagcgtcacccgctatttctttcgactcttcatagtctacaaacctatttccatacgcacaaagaatcgggtagtattttttaaatatactatcaaaagcgatcatctcccctctccttagtgccatcaataagtacgcatcttcattgctgtattccatggctgcaatgataatgcttatattttaaataagcgtaaaataacacagttattaaccataaagtttattaatgttaattatttaaataaccttagtagttttattttcccgcttgtctctttaataaatttatcatggaaatgcatcattcaactatagaagacttgctgatcagctattatgatggtaaagcaacagcagacgaaattcaggaaatagaagcctggatcaaattgtcagatgaaaataaaaagaaggccatggacatttacacacttcttcttatgactgacacgcaacaggttactgaaaaaatggatatggatgaggagctatcaaaagtgaagggacggatgcaagagaataagtatcatatttcctggtggggttggatacaacgtgcagctgttgccttactcataccgatggctattactattttggttttgcttaaccaaccccaatctaccgcccccgtccatgcccagatattcgaagtccggacacaacccggaatgataacttctttcagattaccagacagcactttagtgtacttaaactccggctcagtcttaaagtatccttccattttcaccggtaacattcgtgaagtgagtctgaatggcgaagcgtattttgaagttgcgaaagaccctgaacataaattcattgtttcgactccccaaaaatctaaagtggaagttttgggtacacactttaacctggaagcatttgatgagatggatgaggtgattaccactttggtagagggaaaggtcgaatttgtttatgagaaagacggacagggaagtaaaatactaatgcgtcccggacaaaaagtgatttataataataaggacggacagattctgtcatacaacaccaatggcgaatcggagcttgcctggatggaccaaaaggttatttttgataaaactccatttaaggcagcattgcatatactgaagaaacgctataatgtagattttattgtaaacacttcgaaatttgacaaatatacatttaccggagcgtttacagaacaatatatagaagagattctggagaattttaaaatatcctcacacatacgctggcgtaatgtgaaactgacaaataatcaaagtgaagaaaggaggcagattgaaatatattaaagcctttcatgtttaaccaataaaattataatacgtatgagaaacttccaaccgccttaaaaaaaagcatacaggcagatgttcccgcatccagcctgtatgagaaagcctttaacctgtttgaatacaaacagagaaaattatttcttaactttaattcatgcaaatatatgaagaaaaacaattatgtccaacaattgtgggcggataatcccgtttttattgtttggaaaaaaattcctttgtctatgaaactgctctttgttttctgtttttgttttgttgggcttctatgtgctaacgacagctacgcccaacgtactatgatctctgtgaaagcacaaaacttgactgtgaaagaagttctgtcacaaattgaggcacaatctgattttagctttttctacaatgaccatcatattgatgtagaccgccgggtatcggtagttaccgaacagagcaatatatttaccttattgaatgaagtgtttaaaaacaccaatgtcaaatatgccgtacgtaataaaaaaataatattatctacgcaaatagtggaagcgcctgccgcgaaacaaaccgtgcagataaagggaaaagtgacggatatgtttggtgatccggtcattggcgctaccgtaatggaagatggcacccagaatggtacaattacagacctggatgggaatttcatattgaatacagcatctgccaatgtgacgattacggtttcttacgtaggctatatgtcccagaccgtgaaggcacagcccggcaaaagtctgtcggtcatcctgaaagaggataccaagacactggacgaaatcgttgtcgtaggttttggtacacagaagaaagtcaacctgaccggttcggtatctacggtaaatgccgaggatttactgtcacgtccggtttctaatgtaagccaagcattacaaggattagttccgggaatgaatttttcttatgcttcggatggcaacggtggtgaaattggtgcagacatgaaagtgaatatccgtggagccggtacgatcggtgacggttccaatgcatctccgctgattctgatcgacggcatggaaggaaacatgaatatgctgaaccccaatgatattgaaagtatttcggtgttgaaggatgcggctgcctcttccatctatggttcccgtgcgccattcggcgtagtgttgataacgactaaaaaaggaaaagcggggaaagtcaacattaattataataatagtttccgctggtcagaagccattaatctgccggatgtagcagatgcctacacttatgccatgtacttcaacaaaatgcagttgaatgatggtaaaacagcggtacagtttgacgatacccgtcttcaggctatcaaagattacgcatcaggcacaattaccactactacccaaccgaacagaaatactcccactatctgggactggatcggtaatacgaatacagactggtatgacgtagttttcggaggtacggcattctcgcaggagcattctctcagcgtcagcggaggaacagaaaaaatacagtattatttctccggcaactatatgggacaggaaggaatgatggctatccgccgtgataaattacagcgttattcggtgagcagcaagattaacgcacagctttatccgtggctgaacatgaattacagcatgaaatatatgcggaaagattatagcaagcctaccgcgatgactgataataccttatatcagaatatagccaaacgctggccgatggaaccaactgtagaccccaacggttatccgatgggtaatacgattatccggccgattctctatggaggcgataacaattcgcagactgactggctataccaacagttccaggtggtgatagaaccgatcaaagactggaaaatcttcggagaaatcaattataaagtgatagatgccttcacccatacggattatttaaaggtgccgcagatgaatgtagccggcgaaccttattccggtgatacatggaaaacgtcgaaagttaccgaaggtgccgagcgtaccaattatttcaatgccaacgtctacagtgaatattacagatcatttgccgacgcacaccatctgaaagcaatggtcggttttcaggccgaagtaaataaatggcggcagttgcaggcgtccaagctggacttgatctcagaatccgtgcccagtattaatgccgctacgggtgaatcgactatcgataagtccaaactgacacattgggcaacagccggtttcttcggccgactcaattatgattataaagaacggtatctgctggaagtcaatctccggtatgacggtacttcacgttttgcaaaagacaaacgctggaatttgttcccttccttctctgccggatggaacgtagcccgtgaggcattcatggaacctaccagccatatcattaatacgttaaagatccgcggttcctggggagagctgggcaatcagaatacagaaaacctatatccgtatatccagttaatgaagtttgtcgcccaagatcccgactcccactggctgattaacaacagccgtcccaacacagcgaatgcaccggatttgatttcagcgctattaggatgggaaaccatgcggtcatggaacatcggttttgacctaggtatgctgaacaatcgtctgaccgtaagttttgactggttcaaccggaagactatcaatatggtaggaccagctcccgaacttcctgtaactttaggggcaaatgtacccaaaatgaacaatgcggatatgcagtctaccggttttgaattggatctaggatggcgggaccgcattaaagattttgactacggagtgcacctgttgctttcggacgaccgtcagaaaatcctcaaatacccaaacacgaccggtaaaataaacacgtggtatgtcggtaaatataatggagatatatggggattcggaaccattggcatagccaaaagccaggaagaaatggatgctcatcttgcttcactgcccaacggcggacaagatgcattaggagtcaaatggggcgcaggtgacatcatgtatcgggacctgaatggtgatggcaagatttccgatggagctacgcttaatgacccaggtgacaaaaaagtgattggcaatacttccccacgattccgttttggtctggatctgaatgcatcctggaagggcattgatgtacgcttattcttccaaggagtggcaaaacgcgatgcctggttgaacgacaacatgttctggggagctacaggagggatctggcaatcggcctgctttacttctcatcttgatttcttccgcgaagaaggggatgatttctggagcgctaacaaggacgcttatttcccgcgtatcttggttgataacttcgcaaaaaatcaaaagacgcaaacccgctatcttcagaatgccgcctatgtacggttgaagaatttgcagatcgggtataccatccccgcccagatcacacgcaaaataggtgtttccaacctgagagtcttcttctcgggagaaaacttattcacccttacgggattgcccggaggattcgacccggaaacaattaataccggttatggagcgaaagacggatcgaacagttcaggaaaaacttatccgttgtcccgtactttttccacaggatttagtgttaacttttaattgatgacgtatgaaaaagataattaaatatttatttttgctgacagggggaagctttatactcgcttcttgcaatgattttttggacagggaacctttagacagtgtgaccccggacaactttttctttactgaaaatgacttggctgcctatgctgtgaagcattacaacttcacgacgcatgagggatttaatgccggaatctggaaaaacgacaatgctacagataatcaagctgccactgactatgataagaaatggattcccggtcaatggaaagttccggaagcttatgataatccagcaagtaatgatccgtggtatttctctaccattcgtgaagctaattacttcctcgaaacagtagtgccccgcttcgaaaagggagagatagaaggttcggaaacaaacataaagcattatataggtgaaatgtatttcctgcgcgctaagaattatttgtcaaaactagagaccttcggtgacttcccgattataaaaaacacattgccggatgaaagtgaatctctgattcaggccagcaaacgggccccccgctataaagtagcacattttattctggaagatctggatcaggcaatcagtttgctaaccaataatatatccggtgggaagaaccgaattaccaaaaatgctgctctgttattgaaatccagagcagctctgtttgaagcttcctggctgacttatcacaaaggcactgctctagtaccgggtggtccgggatggccgggaaaggcagaagacattgcggactttaatatcgatacggaaatcgcattttttctgaaggaggccaaagcggcagccaaagaagtgataggcaatgcagccttggtacagaatacagcaaaagactgcatggatgaaacagttaaaacagacgaagacaaatataaaatgagcaacccctattttgctcagttctcagcgaacagcctggaaggatattcagaaatattaatgtggcgtgcgtataatctgcttgactataagattgtgcactcagctcctttctatattcgcgtaggtggaaataccggatttacccggcaatatgtagaaagtttcctttgccgtgacggtaagccgatctatgcaaccgaccagtataaaggtgacgaatcattattgaatgtacgcaaaaacagagatctacgtctacaactattcctgatgacaccgggtgagactctcagcccgaatgtgatgaatggtactcccgatttgctgccggaggttccacaacttctggatataacggaaaagagatgcgtaacaggctatcaggtacgtaaaggattatcaggaaactggtatcgggatggcaacacagcgattgaagggtgtccggtataccgtgcagccgaagcttatctcaattacatcgaggctgactgtatggaacataatggaacttccattggttcggaggcagcaggatattggggagatctccgcgaaagagccggattaccaagagactatacagtgaccgtgaacaataccgatctgtccaaagaactggactgggccatatattcggcaggtaaactagtctctcctctactatataacatccgccatgaacggcgttgtgagctacttgcagaaggtttacgcatgttagacttaaaacgctggagagcactggaccaggttaaacaatttgtaatcgaaggagttaacttgtgggaatccgatttaaaggataaatacatgcaggacggaaaaaatcttctgatacaggaaggaacggaaggacaaacctccaatgtatcaagctatgttaatagcggtaaatatctttgtccttaccgttctgtgaagacaaataatctgatgtatgatgcaggatacacatggtgtgaagcgcattatctgaatcctatcgctatcacgcacttcagaattacggcctcaaatcctaacgatctgagtacttctattatttaccagaatccaggatggccaattcaagccaatgaaggcccgataggtattaaataaagatataggtcatttcggatatggtaaaaagtgtaggacgcaccgggctaatgtttaagaaaaaataaagctcagcgtcctatgcttcaaactattggaaaatttgtaccttggcgggacgaagttctaatgcaaaacaaaacagtctgacattaatatattaaagatagatcaatcaagcaaatctaagaattatgaaaagtacttcaacatggtggaaaatcttactcagtggtctgttattggctggaacactggtagctaacgccgacacttaccagccatcttactccacagcaggcttttatcagctttccaacacaggccgcacagtgtataacatgaatcctgcctggcgattttataaaggcaatatcgaaggagcggaatggccgagattcaatgataaagactggaacatcgtatcattacccgatggcatagaatatctccccaccgaggcaagcggatgcatcaattatcagggtgaaatctggtatcgcaagcatttcactcccgaggaaaactggaaaggaaaacaacaattcctccacttcgaagccattatgggaaaatcaaaaatatgggtgaatggaaagttgctgaaagagcatttcggtggttttctacctgtcatcgtagatgtcacttccagtctgaagtatggagaagacaatgttatcaccgtatgggcagacaacagtgacgatccctcctaccctcccggcaaaccgcaagatgcactggactttgcatattttggaggaatttaccgagattgctggatgatagttcacaacaaagtattcattaccgatccaaattatgagaacgagacagccggaggcggattgtttgtctctttcgacaaagtttccgagcaatccgcacagttgaaactggatgcacatatacgtaacacttccggaaaatccttcagtggtaaaataatctatgaactctatgaccgcgacgacaaacgtgttctctctaaggagaccggtttgtcggtaagcaaggatcttgcgaaacaaatttcttgcaaagtgaccgtagaaacacctcatttatggtcacccgacagcccctatctttacaaactacacatttatataaaagacaaagccggtaacaccatcgacggatattaccgccgtatcggcattcgcagcattgaatttaaaggaaaagacggattctggctaaatggcaaaccttacccctatcctctgatgggagccaaccgtcatcaagattttgcagtgattggcaacgccttacccaacagccttcattggcgggatgcgaagaagttgcgtgatgccggaatgcgtgttatccgtaacgcccattatccgcaagatccggcgtttatggatgcttgtgatgaattaggactgtttgttattgtcaacacaccgggatggcaattctggaatgatcagccgatatttgctcagagagtatatagtgatatccgcaatatggttcgccgcgaccgcaatcaccccagtgtatggatgtgggaaccgattctgaacgaaacatggtatccggctgactttgctaaaaatgtagtggacattctcaatgaagaatatccgtatccttattgctatgccggatgtgatgtaaccgcacgtggacacgaatactttccgatacacttcacccatccgatgaacggaggtggaggagcctttaataccgaaaatctggatccgaaaatcagttatttcacccgcgaatggggagataatgtggatgactggaactctcacaactcaccaagccgggtcaatcgtggctggggagaagtaccgatgctgattcaggcacagggatatgccaaaaacgattaccaactcaccagttatgatggactatacagaacttcaagacaacatatgggcggttgcctgtggcactcgttcgatcaccagagaggatatcatcctgacccgttttacggaggtatcatggatgccttccgacaacctaaactatcttattatatgttctgttcccagcgtcctgccgaacccaacaaagaattgatcgcagataatggaccgatgatttacatagccaatgccatgaccccattctctccgaaagatgtaacgatatatagcaactgtgacgaagttcgcctcacgtattgcaagggaggcaaagaatatacttatcataagccggcaaatgaaagcggaatgccctcacccgtcatcacattcaaggatgtatttgatgtcatgtatgataaaaagctgtcacgccaaaagaaacaggcagattcttaccttctggcagaaggattaatggacggaaaagtggttgcgacacataaagtaacacccacacgccgcccgtcaaaactgttgctttgggcagatgacgagaaaatacagatgaaagcggacggatcggacatcgtgacggtcattgcagccatcgcagatgaaaacggaaacatcaagcgtttgaataattatgaagtaaagttcgaaatcgaaggccagggccaactggttgccaatgaagaaacattcaccaatccacgtccggtactttggggaactgctccggtgctggtaaggtccaccactacaccgggagaaattaaaatccgtgcatcagtggtatggcaaggcaaacatacgccggttccggcagaactgattattcctacttttccatcagaacatacgctggtagcagacaaagatgaactgacacaagcacaatccgcaagcaaagatgccggaaataaaataaataccgctccatccgattgtgagaaacgtgtacttgaattacaacaggaactgaaccgcctgaaactgaaagaagtcgaaaaacaacagagtgactttgaataatgcgcatagttctatctataaacagaaaaaacacaaacttattaaaatacagttatgataaatagaatagtatatacttcatttttattaggagcgagtttcgccagtacagaagcacaggtaagtactcctcccaatattgtattgattttatgtgacgacatgggattctccgatctgggttgctacggaagtgaaatccagactcccaacatagaccgtctggcagaaaacggggtacgcttcagcctgttcaaaaatacaggaagaagctgccctagccgtgctgctttgctgacaggacattatcagcacgaagccggcatgggatggatgacggcagtagatgaacaccgccccggatacagaggacaaattacaaaaaacatccccaccattgccgaggtgatgaaagcgaatggctacagcacatatatgagcggtaaatggcacgtcacagtggacggagcttttgatactcccaatggcagctatccggcccaacggggatttgacaaatattacggttgcctgagcggaggaggcagttattataaaccaacaccggtatacagcaatctgacccgaatcaaagaattccccgatgactattactataccactgccatcaccgattccgccgtcagttttgtcaagcaacaccctacagacaaaccgatgtttatgtacgtagctcattatgcccctcacttacccctccaagctcctgccgatcgtgtagagaaatgcagagaccgatataaagtgggatatgacatgttgcgtaaacaacgtttcgacaggttaaaggagctgaagttcattttggacgaaatggattatcctgtctaccaaaaagaatttgacggaaaacgtccctcttgggaaacactcacaccaaagcaacaggagcaatggattaccgatatggcaacctatgccgccatgatcgaaattgtggatagcggaatcggtgaactggtggaaaccatcaaggagaaagggatgctgggcaataccgtatttatcttcttaagcgataacggtgcaaccaaagaaggcggatacctgggccagcttatggctgatttgagcaatactccttatagaagctataagtcacaatgttttcagggaggcacaagtaccccttttatcttatcttatggcgatgccgaaaaaaacaagatgaaaggtcagatttgcaggcaacctgcccacattatagacatactgcctacctgcatggatattgccacagctacttatccgtcagaattcaaagagaatttgcccggcaagagcttactccctccaatccatggaaaaaagataaagcccagagaattatactttgagcatcaaagttcctgcgccattatttccaatcattggaaactggtacgcggcagccggaatgaaccatgggagctaatcgacttatcggcagatccgttcgaaaccaaggatttgtccgcccaatatccgaagctagtgaaaaaactagaggctaaatggaataaatgggcgaaacaatgtaatgtctttccactcgaaaacaaaccttggaccgaaagaattaactactatctgaaacaaaatccggatcaaagcggaatagaataaaatccgggaacaatagccttcttaatactaggtttagaaaaaagactgttccttttagacgaacagtcttttttctgtttacaagacatattgtttgtatatagctgtttttttattacttttgtgctttcagccccaaagagctgtaacacacttaaattcatgaaatatacttttatctaataataaacacgctacgacaatgagaaagaaacattcgctcctattttgtgccttatttacgatttttacgggacatgcagaagatacggattataccaaaggactttctatctggtttgattctcccaatacattacaaggaaaagaagtctggcatagttccaaacaggatgccagttgggaatcacagtcattgcctataggtaatggaagtatcggtgctaatattttgggttcaatagaggcggaacgcataacttttaatgagaaaacgctttggcgtggcggtcctaatacagccaaaggagcagattactattggaatgtgaacaaacagtccgcgtacatcctggacgaaatacgtaaagcgttcgtagaaggagaccagaaaaaagcggaaaaactgacacgcgagaatttcaacagtgaagtcccttatgaattttccagagaaaagcctttccggtttggtaacttcactacaatgggagaattctatgtagaaacaggattaagcacaataggcatgagtgactacaaacgtatcttatcactggattcggcaatggcggtggttcagttcaaaaaagatgacgtagcatatcagcgtaactattttatttcttaccctgccaatgtgatggtgatgcgtttcagtgccgaccaaccgggcaaacagaatctcactttcagatatgcccccaatccggtatctacagggcagttctctgccgacggtaataatggtcttgtttatagggcttctctggataataatggaatgaaatatgcagtccgtattcaggcaacagtaaaaggcggtaccttaaacaacacagatgaacggattacagtgaaagaagctgatgaagtcgtattctatgtgactgcagataccgattataaaatgaatttcgcaccggactttaccgatccaaaaacatatgtcggcgttaatccgcttgaaacaacccagcaatggatgaaggatgccgtatccaaaggatattccaacttactggacgaccactacaaagactacgcttctttgttcaaccgagtgaaactggaattgaatcctacagtgaaaacatccaatctgcccactgctcaacgactgaaaaactatcggaacggacaacctgactactacttggaaaagctctattaccagttcggacgctatctgttgatagccagttcccgaccgggtaatatgcctgccaatctgcaaggcatctggcataacaacatagacggcccctggcgtgtggactatcataataacattaatatccaaatgaactactggccggcctgctctacaaacctggatgagtgcatgctcccgctaattgatttcatccgtaccttagtgaaaccgggtgaaaagaccgctcagtcttattttggtgcaagaggatggacagcatctatttccgccaacatctttggctttactaccccattggaaagtcaggacatgtcctggaactttaatccgatggcaggtccctggctggcaactcacgtttgggaatattatgactataccaaggacctgaaattcctgaaagaaacaggatatgaactgattaagagcagcgccaactttactgttgactatctctggcataaaccggacggaacgtatacggctgccccctctacttcaccggaacacggccctatcgatcagggagctacatttgtgcatgcagttgtccgtgaaatcctgctggatgctatccaagcgagcaaagaattgggaatagacaaaaaggaacgtaaacaatgggagcacgtgcttgccaatctcgtcccttataaaataggtcgctatggtcagttactggaatggtcaaccgatatcgacgatccgaaagacgaacatcgccatgtaaatcatctcttcggtctgcatcccggacacactgtttctcctgtcactactcccgaactggcagaagcagccaaagttgtattggtgcatcgtggtgacggagctaccggctggagtatgggatggaagttgaaccagtgggcacgcttacaagatggaaatcacgcttataccctctttggtaatctgctgaaaaacggaacagtagataacctttgggatacacacccacccttccagattgacggaaactttggcggcacagccggtatcacagaaatgctattacagagccacatgggattcgtccaattactacctgctttaccggatgcctggaaagacggctctatttatggcatatgcgcaaaaggaaatttcgagatagatattacatggaaagacggacttctaaaagaagcgactatcctgtccaaagcaggacagaattgtatcgtgaagtatgccggtcaaacaatctctttcaaaacagtgaaagggcgtagctatcagctaaaatacgacaaagagaatggattaataaaaatcaaataataacataacactttaacctatgtcatcttagatgaatacaaaaacatttacccccaaatcgaccatgaaaatttatacttgtctttgcttgcttttcttagccggttatctggttgcccagaataatacttcggcattgttgcctatgcccaatcagataacttcagtaaaagggaaaccctttactgtccgttccggaaaaacggccatttatttgagtcagccggagttgcagttcactgccaatacgctgcaaaatatattatcagacagaatgcaagtggaaattccacttgcttccgaatccgaccgtgctgatatccgcttgttaattgaccctgcaatggaaggaaatgagcactatcgcatcgaaataacttccaaaaggataactatcagcggagctactgtacgagctgtttattatggagttatgactatggaccagcttcttttaggtgatgtatgcgccactacacaaaagaaaatttctcctgtctacgttgatgatgcgccccgattctctcatcgggcattgatgctcgaccccgcccgtcattttcttccggtcaatgatgtgaagttcttcattgaccagatggcacattacaaatacaacatactccaattgcatttgacagatgaccagggatggagagtcgaaataaaaaaacatcctaaactagttggcaaagattattatacccaagagcagcttgccgaaatcattcaatatgctgcccaacggaatatcgaggtcattcccgaactggatatccccggacacaccgtagctatattagcagcttatcccgaattaggatgtactcataccgatacgctgcctaagatagtaggcaaaactacggatttaatgctttgtgcaaataatcagaaagtgtattccgtctatcaggatatcatcaaagaaatatcttctttgtttccatccgattatatacatttaggaggcgacgaagctgttatagaaaagaactggacccaatgtacccgttgccaggccatgatgaaagagttaggctatcagaaagcttcgcaactcatgattccttttttcagccgcatgctttcgtttgttcaggaaaataataagactcctatgctttggtgcgaactggacaatatttatccgcctgccaacgactatctctttccttatcccaagaacgtaactttagtaagctggcgtggaggattgacacctacttgtcttgaacttacccgaaaacatggcaatccgcttatcatggcaccgggtgagtacgcttatctggattatccgcaactgaaaggagatttccccgagtttaacaattggggcatgcccgtcaccactttggagaagtcttatcaattcgacccgggatatggcgtgtccgctgaagatcaagcccatatcataggagttatgggcactttatggggagaagctatacgggatataaaccgggcaacttatatggcatacccgcgcgctttcgcactggcagaagcaggatggacacaaatgaaacatcgcaattgggaatcattcaaacaacgtctttaccccaatctgactaatatgatgaagaaaggggtttcggtacgtgttccttttgagatagttgacaggaagtaaaatctcaattataagccatttaatatgctatttcaactaaacatgagatactagctatttttagggatagaacattgatgaagctattcaaatagtatataaagtggaagcatagtactattatttattatactagtacacagttagatatatattattatattctcaaagtattctcacgcctttgagaaatttttctcattgtggtgagaataaaaaggtctttgtacttcactgataataattcggtatttcttgttttatagatgctttaattcattacggaataaaggaatggatatttttatgatgcggtagctttgatatttcaaataagttcttatggaacttggttaattcagtctttaaatagatccaatactgtttgtattcactaataatctcattttctatgtgtgcaaatataaaactatttttttaagaatgatacaataacctcattttttctttattttctttccaataaaatgtttttgctaacaattcctcatcaaaatactacaatttgagtctctatattagtactcaaaatagaataaaagtcattcctatttacaaggtactcattaactaccatttagctttccttcttctaatacgattaagttccataagaactaagacacaatttgtatcttttatagaaacaaaacagcacagttcagcattgaagaaaaaaaagatatagcatgtcaacattttaatataaataaaacaacatatatgcctatgaattaataaccatcagactattcaacttacacgcaacagtacaaaaaatatacttaattaaacattaatcaagtataaagtaaaacgaattcctatatccagggaaacactatgaaatattgcctatgagcataaaaaaggcaatcatataagataaccttaataattcacctaaaatcagattcatggaaaatacatcttagcaatccattcagaaacttcaccaggcgaagttctctatgtacttcccccttggtgcaaatagagttacttaaatctctccttgacaaggagtattattacttaaatactatttatgaaaaagaaaatcacacaaacgttactgccaattattataatcttatttataatgatgcagtttgcctgttcggatgacaataaatcaggcagaaattatgatggacctctaaaattaaccactttttatccggattcaggatacctgtcttccaaaatcataatagaaggtgaaaatcttggaacagatgcttctcaattatctgtctattttaataaaaagaaaggttacatttcacaagcagccggaaatattctgatggtctatgctcccaaattaccaggagatacctgtgtcatttctgttgttaaaggaaaggattctcttacattcgacaataagtttcattatatttcccgttttacggtagaaaatgtatgcggtaaaacaggaagcggatataacattggaggagacctcgccagtacaacttttgaagcctggcgattgaaagtaggatgttgcgatccggaagggaattactattcatgttattcctggtttggaaacaatggaggtctggcattaatcagtgaagaaaaaaacttatcaaagaaaattatatctgacctagtaaatgatgtgatgtaccataaagtaacagagagactgtatgccgtaggcacacagaaaaatgtcatttatgaaattgatccctccaacgactggaaagttaaaagacgttacctgaaaccacaggaccctcctgccaaacaagttgattacaattccacagcctgtatcgcttattgctctgctgacggttatttttatgcccgtacatcaaccaaacaattattccgtttcaaacttgatgacatgatatgtgaatatatcaagaacgacgtatacaattcgacaaccccagaaactgaaaacagttatattgttagcatgatgttcgacccgaccgaacccactcatctgtatacttcttacggggcatcttccgttataactgtacaagatgtctcaaagccggaatcggaagaaacaatatatgccggtcaccttaatgtgagggctgatggcagcagtactactcaggtaattaatggatatcggacagactgtttgtttaactggaacaaccaaatgagtattatagcggacgaatccggacaaaaaaacatgtacattgcagatgccggtacccagactatacgaaaacttgatatgaatacaggtatggtaactacggttgtaggcagacaaaacgttaaaggtaaccaaagcggaactccattggaagccactttcaactggccgaaaggagtaggactgactgccgaaggagatttatatatttcagactgtggttctggatgtgttcgtaagctgagtttacgttaaccttaataatcatttgtaaataagatactgatgaaaaaatacatactattatcattattcttctgcaccgcatctatattaatgggacaggagaaaaaattaacaatatcgggacatgtattcgatgaaaacaatgagtcgctgcccggagtcagcgtttacttaaaagaccgtgcgggagtaggtaccagcactgatgttgacggagcattcaagctgtctgcccaaaaaggagatatgatcatattttcttttattggctacaaaaagaaagaacacatcgccctaaaagacgaaaaggacctgaaaatcatcctaaaaaacgacgcacagcaaatggatgaagttgtcatcaccggtatgggtacaaaagaaaagaaagtcaaccttaccggagctgtcaccaatgtagatatatcacagatacaaacacctgcgacttctctgaccaatatgcttggtggtcgtgtacctggtattatctccgtacaatccagcggtgaaccgggttctaatatgtccgaattctggattcgtggtatcggtacgtttggagcaagttcaagcgcacttgtacttatcgacggactcgaaggtaacctaaacagcattgaccctgccgacatcgaaagcttctccgtattgaaggatgcttctgcaactgcggtatacggtgtacgcggtgcaaatggagttgtgttggtaactaccaaacacggaacatccgacaagatggaagtaaacgtccgtgccaatgtaaaaatctcatatctgacaaaacttcccgaatatctacgcgcatacgattatgccgtgttggctaacgaagcaagtgccatgcgtggagcacaacccatttatgatgacatcgaactgaaagccatccaatatcatctggaccccgacttttatccggatgtaagctggcaagatgaaattttgaaaaaaacctccttgcaacaaacctattacgccagtgccagaggaggcggtagcattgcccgctattttgtcagtatgaatatgtcgaatgagtcggcaatctataaacaggacgaaaacagcaaatacatcaaggatgtgcactacaacacctatggtatgcgtctgaacgtggactttaacctgaccaagacaaccgagctttattttgggtcggacatctatctgtcatctcaagcgctacccggacaaggagcatcgaccgaccaattatgggatgcccaagccaaattgaccccgctaaccatcccggttcgttactctacaggtgaactaccgacttacaagtctggggcagcggacgtgtactcaccctatgccatgctgaattacacaggcttgaagaacatcaacacctactcgggtacctatactatacgcttgcaacaagacttcgactttctattaaaaaatctgtctcttgacgttcaaggagcttatagtaacagttcttatttttcagagacacgtttggtcaaacccgacatgtactgggctgaacgcagggatgagaacgggaatctggaatttgtacataccataaaaaaacagggaacaacatatactaaagacagagacagccagtatcggaaatatttccttcaggcaaatctgaaatggaataatctattgaaagatgaacatcgcatttctgctcttgtgcattatgaaatgagtgacagcaaagacacaaatggcttgaaagacggcatggcagctattcctttaaggtatcagggattatccggaagaatcagttatggtttcagagacacctacctgctcgacttcaacgcaggatacaccggttcggaaaattttgaagcaggcaaacgtttcggattctttccagcaatatccggtggctgggtacctacccaatacgaattcatacaagaaaagctcccctggctgaatttcctcaagatcagggcctcttacggcatcgtaggtaacgaccgtatttcagacaagcgttttccttacctgacgatcatcaacgagtctgccgaaaaaggctggggatacaacgaagctggcattacagaaaaacaaatgggagctgacaatctgaaatgggagaaggcaaaaaaaatagacgtaggtatcgaaggtgaattattcaacagcaaactgagcttcgtggtcgatttcttcaaagatatccgcgacggcatcttccagcaacgccagcaagtaccaggttatatcggtcttgtcagcatgccatttggcaatgtaggcagtatgaaaagctacggctcagacggaaacgtaacctatatccaggatatcggcaaggatatgtcactgacattccgaggcaattttactcttagtaataacagggtgaattattttgaagaagcagataccaaatatgaatataactctgccaccggacgtccctatggataccagaaaggattgattgcattagggttattcaaagatgacgaagatattgctaatagtcctaaacagactttcggtagctatctgcccggagatattaaatataaggatgtcaatggagacggcgttgtgaacggagatgataaagtacctttgtcattcagcagtacccctcggttcatgtatggattcggagttgaattcagatataagagattgtcggctgccgtactgttcaaaggaatcggaaataccgatgtgtatcacgtaggcttgggatatggcgccggctatattccatttcaggacaagcaaatcggtaatgtattgagcatagtaaaagaccccgccaaccgttggatttctcgtgaatatgccgagaaaataggcatgaaccctgctctggcagagaatcccaatgcccgatttccacgtatgtcatatggaaatctggagaacaactctcaactatccaatttctggatagacaacgcaaaatacttgcgactatcggaagtaaacatcaattatagtgtaaatgtacccaagactataaagaatttgggaatcaactccatcgacctttcactcgtaggcaataatctttgtgtatgggataaaattgacatctgcgacccggaacaggcagtctacaacggacgtcgctatccgattcctgcaagcgtgactttgcaagcatatattaaattctaattatcaaaaaatgaattatatgagaaaactaacattatactcaatgctattgttgcttaccttttctatttcttcctgcaattatctggatgtagacaaatggttcgacgatacaatgaaatacgactcaatcttctcccgtaaagaatacctggaaagatatatgtggaacgtagcatccatgtttcctgatgaagggaaattcctcaatagcccggcaacaccgggtcctttagctactgatgaggcttttgaaacattcaatgcagagagctatgcaggtatggcatttgttaccggatccattaatgaagaaaatatcagcgggaaatccatttatcaatggaacacgatgtacaaaatcatccgtaaggcaaacatcatcctgtcacgcatggacgaagtaactgatatgagtaatctggaaaagccggacatctgggcatacacctatttcatgagagcttacgcatactaccatctcatcatggacttcgggcctgtcattcttgtaggggatcaggtatatccctccaacgaacagccggaagcctacgcaaacgtacgtgctacgtatgacgaatctgtagactatgcctgcgaacagtttgaactggcggcacagtatctacccgaaactcagccgaacagcagtttcggacgtcctaccaaaggtgcggcttatgctctgattgcacgcttaaggctgatacaggccagcccattatacaatggtcgcggacaaacatactttgggaactggaaacggagtagtgacggagtgttctacatttcccagcaatacgacgaccgcaaatgggcggtagccgcagcagcttgcgaaagagtgatgaatatggggcgttatgaactgcatacagttccggcggataaagactcctatgtacctccgaccaacgaaaatctagcattccctaacggagtaggcggcatcgacccactcaagtcttacagctatatgttcaacggtgaaaccgacggcagaaaaaataaagagtttatatggggaagaaccaccggtaacctgtgccttagagaatcttttccgcattcaatggatggatataacgggatgggagtatcacagaagatggttaatatgttctatatgaatgacggaacagacaactaccccgaagatgcaaaaccatacaaagcagacgggacatacgacaatacgaatttcagtacagaggacgaaaccttctccgaatatgtactgaaatcgggagtcttcaacatgtaccgcaatcgggaaatgagattctatgccaatataggtttctccggccgtttttggaaagcccgttcatacagcggaagcgatgccaagaaggagcagatgatcaaatatgacaactcttctgtaacggatggtaagcactcctccagtggtaatgtgaacgactaccccgccacaggttatgttatcaccaaatacgtacatgatgatgacgcattctcctcgcccggaggaatgataatggagaaattctttcccatcatccgttatgcagaaattctgttagcttatagcgaagcgctcaataatcttcaaggtagttattccatcgaactgaaggaatcaaacggagagactaaagtctacgaagaaagccgtgacatatacaaaatcaaacaggcgttcaacccaatcagataccgtgtaggactccccggagtgaaagatgatgagttggccagcgtggatggctttaacaaaatccttcaaagagaaagagctattgaattcttgtatgagaatcaaagatactatgacgtgcgccgatggggcatctacgaagaaaccgaaaaggaagccatacagggtatggacctcagcaaagatgagatgaacggatacttctactccgtagtagtagatcatccctggataagacacagagtggtaaaccgcaaaatggtattcctacccatcgacaaatacgagatacggaaagtggacggtcttgatcagaatcccggctggggcgattaagcataatactttatgaaacaactcattagcattaaatataaattaaaataataagaatgaaaacatatagcataagcatcctgtcgctgttactcgcattactgtttcttgccggatgcagtgacagaaagaaattctttgaagatgaacgatacgagaaaatggtatacattgtcagcgacaataacaatatacacaatttggtttacgacctggatggcaaagacggtaatatacgcaatctgtcgattgcgtgtagcggaaccaatccgacagaggaaccggttacaatatcgctcacagaagacacagttcttctggatgaatataactatacgaactttatcgaagattatagccgatatgccctcaagatggacccgaaagactatgcgatagaaagcagcacagttacttatccgacaggagaaccatacacgttggtacctatcaaaatagacatttcagtcattgaaagtctggacccggataaaatctactttattcccatagcaatagccgacgcaactccttatcctatagtaaaaaagaaaggaaatgcattattacagatacaaaagaaaaacaaatataccagttccgcagaacctgcaagctataatgcatcagggtatgaaggcagcggatactttgtcatcaccaaaacaatggtacctctgaccaaaaatcgggtaagaatcaatatcggtactaagagattaccggcagaaccggagaatcagccggacttcatcaagaaaaatacgattgttatcgaagtagctgatgataactccctgactgtagaaccttatgatcctgaagaaatggaagtggaaacagtggatgtcaaagtagcccatccgggtgataacgcctatgcactctacaacaaccggctcgacccgacaactacgaccttctgtgtatgctataagtatagactcaaaacaggtagttggaccgaagtacgggaagcaatacgcttaccggtgattgtcatagagtaaacaagccaaataaagacctattaatataaatccggatataaccatccgaatcagaagaagttattgcaaaagtctgtaagctctcctccccccctctctttttttaaggagaagggagagctgaagacccgaagagcagataaacacacaaaccattatcatataaattcatcctgccgacacctttctgacaataaggcagagaaataaaaaacaattatggaataaacacaaaaagcccctgtaaagtattaatttacagggactttctattttcttaaagcggagagacagggattcgaaccccgggtacctcgcagtacaacggttttcaagaccgccgcaatcgaccactctgccacctctccaaaactcctttatcagaagtgctttccgttgaaagcggtgcaaaggtacgaatcatttttaaatctgcaaacaatctgacatttttttcacgaaataatcgtatttttgcagcctataataagtataaagatatgatatatcctcaaaattttgagcaaaagataggattcgaccaaataaggcagttactgaaagacaagtgtctcagcactttaggcgaagaacgggtttcagacatgagcttttccgagctatttgaagaagtggaagagaaactgaaccaggtaactgaatttgtgcgcatcattcaggaagaagacggatttcccgatcaattcttcttcgatgtccgcccatcactaaaacgggtacggatagaaggcatgtatttggacgaacaagaactatttgacctacgccgttcattagagactattcgtgatatcgtacgttttctacaccggaatgaagaagaggaggaaaacgatgtaccctaccccagcctgaagcggttggcaggagacattgccgtattcccccaactgattggcaagatagacggtatccttaataaatatggaaaaataaaagacaatgcgtccagcgaactggcccgtatccgtcgggaactatccaatacgatgggaagtatctcccgttcattaaacagtatcctacgtaatgcacagtctgaaggctatgtagacaaagacgtagctccaaccatgcgtgacggccgtctcgttattcctgtcgcaccgggattaaaacgaaagatcaaaggtatcgtgcacgatgaatcggcaagtggaaagaccgtattcatcgaaccggcagaggtcgtagaagccaacaaccgtattcgtgaactcgaaggggatgaacgacgggaaatcattcgtatccttacagagttttcaactatactgcgcccgtctatcccggatattcttcagtcgtatgaatttctggcagagatcgactttatccgtgcgaaaagttattttgccatacagaccaacagtctgaaaccgacagtagaaaaggaacagctattggactggacaacggcagtgcatcccttactgcaactgtctctagccaaacatgggaaaaaggttgttccactggatatagaactaaaccaaaagcagcgtatccttatcatttccggtccgaatgccggaggtaagtctgtctgtctgaaaacagtcggtttgctgcaatatatgttgcaatgcggtatgctgattcctttgcacgaacgcagtcatgcaggtatgttcagcagtatcttcatcgatatcggtgacgaacagtccatcgaagatgacctgagtacttattcttcgcacctgaccaacatgaaaatcatgatgaaaagctgcaatgaacgcagcctcattctgatcgacgagttcggaggaggtacggaaccacagatcggaggagccatcgccgaagctgtgctgaaacgtttcaatcagaaaggaacgttcggagtaataacgactcactatcagaatctgaagcattttgccgaagatcatgaaggagtagtcaacggtgccatgctctacgaccgccacttgatgcaggcactctttcaactacagatcggaaatccgggcagttcatttgccgtagagattgcccggaaaatcggattgccggaagatgtaattgcagatgcttcggaaattgtaggaagcgaatacatcaatgccgataaatatcttcaggacattgtacgcgacaagcgctactgggaagggaaacgacaaacgatccgccaacgggaaaaacacatggaagacaccatcgcccgttatcagacggaaatggaagagttgcaaaaatcacggaaggagattatcagacaggctaaagaagaagctgaacgaatgttgcaggaatcgaacgcccgcattgaaaataccatccgtacgattaaagaagctcaggccgaaaaagaaaagacccgcctggtgcgccaggagctgaacgatttccgtacttctctggaaacaatgacttccaaagaacaagaggaaaagattgcccgcaaaatggagaagctgaaggagaagcaggaacggaagaaaaacaagaaaaacgaaccgaaaactgccgcatcacagacagccgctacccctaaagtaatgcctatcaccgttggtgagaacgtaaagatcaagggacagacaagcgtcgggcaggtcatggaaatcaatggtaaaaatgcaaccgtcgctttcggaagcattaaaactacggtgaaactggaccgtctggaacgaagcaacgctgcccccaaaacggaaggaatagccaaaagtacgtttgtcagcagtcagacgcatgaccagatgtacgagaagaagcttaatttcaagcaagatattgatgtacgggggatgcgtggtgacgaggctctgcaagccatcacttatttcgtggacgatgccatccttgtcggcatggaccgcgttcgtatccttcacggaacaggaaccggaatactccgtacactcatccgccaatacctgtccaccgtaccgggcgtcagtcattatgcagacgagcatgtccagttcggaggtgccggaattacggtagtcgattttgactaatctgtaaacaaaacgatcgaagaacttgttctcatttagaaaaccactacctttgtgttacagtggttttctaaaacgagaataaagcatgaagaataatctgttaagcgaaaagcttatttacacaggggacagccttacccccacccatttacatctctgcacatacaatgcaaccgagatgcaggaaagctccggtgacaccttccaaagcgtcaaagaaacattggataacgaacgaatcaactggctgcaggtacacgggctgaaagatacggaaaccatccgtgagatttgcagtcattttgaaatagacttcctcgttttacaagacatattaaatgccaaccacccgacgaaaatagaagaacatgacaaatatattgtcctgatcctgaaaatattctatcccaatgagcataaagaggatgatgacctcgacggattgctccaacaacaagtctgcatcattctgggaaataactatgtacttacctttcttgaaaaagaaacagatttctttgatgaaatcaacgccgcattgagaaacgatatactgaaaatccgtagccgtctgacggattatctgctcagtgtattgctgaacagcatcatggcgaactacatttcaacgatatcttccatcgacgatgcactcgaagatctggaagaagaactgctgatgattaccaatgagaatgacatcggcattcagattcaggggctgcgccgccaatatatgctgatgaaaaaagccatcctcccgcttaaagagcaatatgtaaaattgttgcgggcagaaaatctccttatacataaagtgaaccgtgccttctacaatgatgtgaacgaccatttacaatttgtattacaaacgattgaaatctgccgtgaaacactgtcttcgttagtcgacctgtatatctcgaacaatgatttacgaatgaacgatatcatgaagcggctgaccatcgtatccaccattttcatcccgctaacgtttcttgtcggtgtgtggggaatgaattacaaatggatgcccgaactggactggcggtacggatatttatttgcctggattataatggcggttatcggtattattgtatatttgtacttcagaaaaaagaaatggtattaactaaagcgcacccatccatgaaatcaataaaagaattatacagaatcggcacaggtccttccagcagtcatacaatgggccctcgtaaagctgcagaaatgtttgttgaacgtcatccggatgccgcttctttcaaagtaaccctttatggaagtttggcagctacaggcaaaggccacatgacggatgtggctatcatagatactttacaacctgccgctccggtagaaattgtatggcaacccaaagttttccttcccttccatccgaacggaatgacgtttgccgctctggatgcaagcaacaagatattggaaaactggacggtttacagtatcggcggcggagctttggcagagaataatgataacccgacaatcgaaagcccggaagtatacggcatgaacaacatgaccgaaatcctgcaatggtgtgaacgtaccggaaaaagttattgggaatatgtcaaggaatgtgagagcgaagatatatgggactatctggcagaagtatgggacacgatgaaagacgctatccaccgaggtctggaagccgaaggtgtattgcccggaccgctgaacttacgtagaaaagcttccacctattatatacgtgctaccggatacaaacaatctctgcaatccagaggacttgttttctcttatgcactggcagtcagtgaagagaatgcttccggtggaaagattgtaactgcccctacctgcggttcctgcggtgtgatgccggcagtactttatcatttacaaaaaagccgtgacttcagtgacatgcgtattcttcgcgccttggctacggcggggctaattggaaacattgtcaagttcaatgcgtccatttccggtgctgaagtaggatgtcagggagaagtcggcgttgcctgcgcgatggcatcagcagcagccaatcaattattcggaggaagtccggcacagattgaatatgcggcggaaatggggctggaacaccacctggggatgacttgtgaccccgtatgcggtctcgttcaaatcccttgtatcgagcggaacgcttatgctgccgcccgtgcactggatgccaatctttattcagcctttacagacggtatgcaccgtgtttctttcgacaaagtggtacaggtaatgaaacaaaccggacatgacctgccctcactgtataaggaaaccagcgaaggaggactggccaaagattatcaacagatgtaatataatgactacagaggaatgtttgtccacattcctctgtacataactaattctactccataaccggccaattcgtatcatcgccattggtgatatccctttcatgcaacaagcctccttcctgcgaaaagtacagtgcaaatctcagatttccctgtttcacctgaatcacggactcagtaggatgctgcggatacgtcaatacaaacacatcggtcactacccatgaactgtagttggaattacggaaaccggtataaacggcaggtactaactgatcgatactatccagttcgttttcggtcatcacccagttggcattcgcgtcgaaccagacatccagttcgtcaccagtcacccagcagtcagctacataataatctcctttcatctcccactccacattctgggcattcggatatagttgcttcaatgcctctgtgatattggcaggcggattatacgtttcatcatcattatcatcacatgcgctgaaagaaaaggcagtcagcattaaaacgactgcccatgcgccaaacttaaacttcaacataattaattcttaggatttaggttatatcatattttcatttaatcatcaatcatccgctttcaggaattttcctttcttgtcgaacttgaaagaaacgccggtacttaattccacttcatatcctttccggtcacgctccacttttgtcacaggctctgtgaagttatgctctttcagataactgacagcaaacgaaggaacaacacttgccggaactgcatgccctttactagcacttacttcctcccagttacctttgctatcaaaatctatttccgtaccgtccgtcaataacacttcatacttggcagactccaacagatctttatcaatcttgatatgagccacctgaggtttggtaaaatgacggttgataaagttgcgtgccggaagcggtagctgattcatatcctttgtaatcacatcgccggcaaatgagaactgtatagctacaatagccatcacaagcaaagataaaattttcttcataatcgttattctttttagttaatactatatctgataagttttatactgcaaataacgatacagatttaggaaagatttgggaataaccagagatcacattcttttttatgttctttaactttcagtcttgaatttaccccataaaaaagatccggatgcccactcaggaacatccggatcgctctctcttcaccttaacttttaaccttaactatttacctatttatctttccgaatatcctgcgagattgtagcaaacgggaacggtactatcacctacacggtaaattccgaacttaaagtaatacccgtcttcgtcgttacgtccaatcagaatcttctcattatcgacaatgtgtttgctcactttcttaccttgctcctgataatccatccgtacatccagcatgcccggtttcacaatcgtttccgcttccttgccatagaccgtccagtcgatatggacacggaaagtaatccagcagtctttcgggaaatcggcaaaaggtaatttgtaggcaatggtggatgccttgtattcagaagtcagcggtttcataacgggcgtctttcccgggtttgcattgcaacggtcatctttgtctgtcagccatttacggtcggagtttgctttgatataaaacagtcctccggaaaatccgaatgccaatggcgggtatcctccctgttcaaccaaccatccgttgggttttcctgccttatatacaggttttccatttttatctttcaccggattaccttgtttatccagtctggccactttttcgtgtccgacattctttttgaagaaggtcgttttttccagttctacaaattcgtcaacagtcagtttcttcacctcgccctgaggagtctggaccagcgtccggtcgggcattccgtgccattgggcaaagatggtggagacattgctgtctaaagaagaaggaataaaaaccgaaaactcatagtcgcgggaacttccttgcggacaagctcccttcccgtgatgataaactgtctttgtgatctgtgctttctgataaacgtcggcaggtaatcccctaaaatcgtcagaagttgcatagcaatatgaaaactcggcacgtcctttcgtttctcctttcgcataaccttccagtgtattgtcttcggttttgagttcaaagcgataggagggcttgccatcaaacaggttggtaaaatcacgctgaatggcatgaggtttattcgtcccgacagctacccagcaaccgtcaataatctggttgatacgtgcagagtcagcctgtacgtttacccgttcggtgagtggcatcagtgtttgcgtatttttagtctgagcagtcagcatcgtgcatcctgccgccatcatataaataaccaaaatgtattttttcattctatccggtattaagtttatcgacggtgcaaaaatacgaaaggcaacccttacggctgcctttcgtttgtctcaaatgctttcacatttgtgcaattcttctgtcagaaacgtcttatatccccattcacaagcctattcaggtgtttcttccgtataatcgtcttccaacatatctactttctttatgctcatttttccatcggccgttacagtgatggaaagcggaacatacaaatcggtctgcggatagcacacactggcggcgtagacaattccctccggtgtagtcttgtcatatacgattccttcaagtatggattttgaaaggaatttcgcgtcgactaccgatgaaaagtcgttcttcgtaaatgtcttgttgagtacgttttcacttccccgggtgatgcgcaacactattttattgtctacatacgtatcccccatctcattggagacgtgaggcagactttcgtcaggagtacgcgaaaccagcgaatgatagtctcttcccttaaacttaatatcagtttcagcttttgaactttgcatacgctgcaacccgtgagcatctacactgtcttgccttgccaataccgattctttatttgaacttccgttcttaccgccacaggctgccactgccagagccaatggtaacaaaagcagataaattagctttttcattccgaactattctgttttataaatatagagcaaaggaacaaaaagacggggagatttacaagtgtaaccgacatttttcctacatttgcaatcaagagtgctaatattaacacaacaattaaagatttaatgccttgcaaacctgatatcatgtatcaacgaatcatagccattctttttttcctttgtgcatgttgcattcaaagcagcaccgcctatggacaaaaagtaaattatcagcaattcgacaatatttatctcggtgctgaagcatcggtggtcagttgtttccttcaagacagcgaaggactgatatggataggttccaacaagggattattcagttatgacggttattccacacagcagcatttcacttacggagaaatcaataacacccgtatctattgcggtgtcattatagataacacctatttatatatgggtacggacaacggaatcctaatctacaattaccggactgaccgctacgagcaaccggaaactgactttccgacagatgtacgcaccatggctctgcaaggagataccctatggctaggcgccttaaacggtttatacacttatcagctgcaaagccggaaactgacatcttttgataccagacgcaacggacttcccaataataccatatactccattatccgcaccaaggataatcaaatttatgtgggaacctacaacggactatgccgctatatcccgtccaacgggaaattcgaaggcattcctcttcccatccatagcagtcaaagtaacctgttcgtcaattctttgctggaagataccacccgccagtgtgtctggattggtacggaaggctatctcttccaatactttccgtcaaccggacagataaaacagacagaagccttccataataattcgatcaaatcattagccctggatggaaacggagacttactggcaggtacagacaacggactttacgtctatcataacgataccaccccgctacaacacatcattcacgactcccgcaatatccagtcgttgaccaataatatcatctggaatatctttgccgaccaggaacataacatctggctgggtaccgactatggcatctccctctcacgctataatagtgcgctgcagtttattccaatctcacagattacaggtacgggagacggaaaccaattctactccctgtttcgtgactcaaaagggttctattggtttggaggagccaacggattaattcgtttcactgatcctgccggagaaagacacgatgccatttggtacagaatgggcgacaagacttatccattatctcacaaccgcatccggcatatttacgaagacaaagaacagcagttatggattgctaccgacggaagcatcaaccgctacgattatgcaacccgccaattcatacactacaacattgtagacaatacaggaacgtataataccaactggacctattatatatttgaagataccgccggacaactatggatttcaacatgccttggaggaatctttgtagtagacaagcgcaaattgatgcaatctacctccggacaatatatagccgaacagaattactccgtccacaacggactgtccggtatgtttatcaaccagattattcccgataatgaaggcaatgtatgggtattgctctacaataataaaggaatagataaaattaatccccgcacacgggaagtaacgaaattatttgcagacgaattaaccggagagaaaagccccaactacctgttatgtgatgaggacggcttgctttgggtaggatttcatggcggtgtcatgcgcatcaaccccaaagacgagagccagcagagtatctccttcggaagtttcagcaacaacgagattttatccatgacttgcgtcaagaactccatctgggtatccactaccaacggcctctggattatcgaccggaaaacaatggatgcccgacagcagaatatgacaaacaaacgctttacaagcctgctgttcgacccgaaagaagattgtgtctatctgggaggagccgacggcttcggtatctcacactccaacctagaagccacataccaaccggaacgtccgattctgttgactgccttatacattaacaatcaactggtatcgccacgcaccagagatgacgtgcccaatatccgatataccaactcaattaaattaaaatatgatcagaataacctgtcattcgagttatccgaccttccttattcgctggacgagaaaaacaagtttgtctatcgtctggaaggcatggacaaagaatggaactttctgaaatccaatatcaaccgtattacatacagtaatctgagttatggaaattatcagcttatcatcagcaagctggagagagacggacaaccatccaaccgtcctcatattctgaatatccggattcttccaccgtggtactatacgatatgggcaaaagccatctatatcttactgctgctcagtcttatcgcatggacaatcaactttttccgggttaaaaaccgcctgaaagcagaacgcagggaaaaagaaaaaatactggaacagtcccgtcagaaaatggcattcttcaccaacttatccaatgagctgaagacacctctcagccggatcatagctcctatcagccagttacttccgtctacggaagaagtacacgaaaaacagacactggaagaagtgcagcgcaacgccatgaaaatcaactcgctgattcatcaggtactcaacttcaaccggattgaagacaataaagattcattgcttatcctgtcacgcatcgaacttgtatcattcagccgcagtttgttttcagtctatgaggaggacaaacggttcacgttccatttcgaagcaaacaaagcgaagatttacgccgatatggatgccatcaaacttggagtaatactagataatctattatcaaatgctgtcaagttcacctcagagggcggaaatatccgcttatcccttttctatcggcaggaaaccggtttgctggagatttgcgtttccgatacgggagcaggcattccgcaacaggatattccttatatcttccaacgtttcttccagtcaccccatagcggcagcaaagaaggcacaggtatcggactttatctggtaaagacctacacggaattacacggcggttctatcgatggagtcacctccgaaaaaggaaagggaacttccatcgggctgagcattccggtcattgctgtagaggaagacgaaataccagtcatagcatccaaaaaacagttggaatctctccccatacttaaaccgatcgaagcagaatcgcaggatgagaaatttctgtcgaacattatccgtctgattgaagatcacctctccgatgcagacctgaatgtcaacgcactttgcgaactgtcgggaatcagtaacaaacagatttaccggaaaatcaagcaactcaccggaatgtctcccgtggaatatatcaagtccatccgcatgaagaaagctgccatgttattgcaacaaaagaaattcaccgttgccgaagtgatgtatatggtaggattttccaatcattcttatttctccaaatgctttcaggcagagtttggaaaaacaccgcgccaatacttgaatgacgggctgtagaggcattttagggcttttcgtcctatttttatccttatatgtccaatctgtgcttttatgaaaatgccaggcagtctatctttgccgctatcaacaaaccactaaatttgatagcatgaaaagacagtttattcttacttgtatttgtccgttatttgccttcgtcagcacacaaggtaaaacgacttccacacctttcgcacatgcttaccgtgccctcggctatttgagagcagatcgtaaggcagctatagataaagatgtataccacttctcccgaccgaatgatactattaaccgatatttcaataaaataaatcttttaccaattacacaataattatgaactgtaatatcttaaatctacgccatctgactgtactacttatattatgtacagcttttcttggaggcgcaattcctgcctttgcccaacagggagacaagaaaatgaccggacaagtgatcgatgagaacaaagagccgatgatcggagtcagcattcttatcgtaggaacatccacaggtacagtgaccgactttgacggaaactatactctgaatgtaccgaaagacagtaaggaactacaattttcttacgtaggatatgaaactaaagtgataactattcccgtaaacagtaacgtactgaatgtacaaatgaaaagcgactcacaagtactgagtgatgtagtaatcatcggatacggaacacaacgcaaaagcgatctgaccggctcggttgcctctgtgggtactaaagactttaataaaggcatggtttcatcgcctgaagagcttgtgaatggcaagatcgccggtgtgcaaatagtaaatggcggaggttcgcctacatctgtctcaaccatacgcattcgtggtggcgcatcacttaacgcatccaatgacccattaattgtactggacggggttcctatggaagtgggtggttccatatccggcggcggaaactttctaagccttataaatccgaacgacatagagagtatgaccgtgctgaaagatgcttcatccactgctatttatggatcacgagcatccaacggcgtcatcatcataacaaccaaaaagggaagcgggagtgatattaaggtctctttccaaacgaccaattccattgcaaccaagaccaagacttcggatatgctgaacacagacgaatttataaatattgtcaatcagtatggtacggaacaccaaaagtcattgcttggtgactatcgtacaaactggaacgatgaaatttatcaaacagctttcggaacagataataaccttagtgtttcaggacttgcacttccttggttgccatttcgtgtttcaaccggtatgtattatcaggatggtatcttgaaaacggataatacaaaacgctttaccggaaacgtaaaccttactccttcgtttttccataacgagctgagatttaatataggtttaaaaggcacttattctaagaatcgctttgctgataccgatgcaatctgggcaggcagtacgctcaaccccaccattccggtatattccggaaacgacacctttggtggttacaacgaggctatcgatgccaatggcgtaccggtgacgggagcattagccaatgctgtcggccgactgaatcaatacgattccacatcggatgtctatcgatttataggaagtgccagcgtggattggaatgtaaaatgggtaaagggcttgcgtttgcatactacgggcggatatgactggtcaaaaggcaaaggacatatttatgtacctaaagaggccgtttcttattatacaaccggcggacgtgactacacatacggcccgcaaaagaattacaataaactgctcacgatttatgccaattatcataatgacttcgatgctattcattccggcattgatgtaacagcaggatatgattatcaattctggaaatataccactccgttttatgccattctgagtgccgatggagtacagcagtcgacttctgccgcaaccgatcagcggcattcactcatgtcatactatgggcgtttgaattacacattcatggatcgctatttgcttacggccaccatgcgccgcgacggctcgtctcgatttgcatccgacaatcgttggggtactttcccctcagtagccttagcttggagggtttcacaagagcacttctttgagcctttgcgcacagtgatgaatgacgtgaagttgcgcgtatcctatggtataaccggacagcaagatggtatcaccaattatggctacattccggtctacactccgggacttgacggagcacaatacctgtttggcggaaatccgatatatacctatcgtcctgaagcatataatcctgaattgaaatgggaaactactaaatcatggaactatggtatagatctggcatttttagaaaacagatttaccttttctgctgatttctataccagaaagaccgaaaatcttctggccactgttccgatgccagccggtacgaactttgataagctaatgcttcaaaatgtgggcaatgtagactcaaaaggacttgaactctctgttaccggacacatcatcaatacaaaaaattggtcatggacggcaagtgccaatgctgcatggcaaaaagtaaggataaagaatcttacgcttactcccggtgctccaagccctgacacagaagtaggtccctggattgatgcttaccagatgcaggtgttctctactgattacgctccctactcattctatttatacaagcaattgtatgatgcggagacggggcaacccattgaaggcttgtatgccgaccttgacggagatggcgagataacgaacaaagaccgctaccatcatcattcaccggcaccagactggattttgggcttttcaacctcgctgcgctataagaagtggacactttcaacctcgcttagagccaatataggaggatatatctttaatggtatggccatgaatacaggtgcatgggaaaccatgagctataacgattatcaacttaataacttaaatcggagtttcctggatacccgctttaccaagaggcagtttctcagtgaccattatcttgaaaacgcttcgttcttgaagatggacaacctgcaactctcttatgacttcggtcgcatatataagaccatcggccttcatgcctctgccatggtgcagaatgtctttaccgtgactaaatataaaggtgtagaccctgaaacagccaatggtgtcgacacatctgtttatccgcgtccccgcacgtattctatcactattggccttaatttttaactgaataaaccatgaagaaaattaatatactaacaataatcgtatggtgcatgacccttgtagcaagctcgtgtacagatgttcttgatcagatgccgacaacagaagatacctcaaaagatgtttatgctgaagcggcaaattataagagagttcttgccaaaatatatgcctcgtatgttcttgcaggacaaggacaaggtggagacaacggagacctcaccagcattaacaagcaagacttttcccgtggctatttcaatctgcaagaagccgctaccgatgaagtagctaatacctggctttcaggaaacaacctgtctgaccttacctatatcagttgggatgcgaaagattcttgggtttctgactcctattactggcttttcttcaacatagccttgtgtaatgagtttcttcgccattgttcggatgaagagattgcccggttttcagaagccgaacaaactgagatccgtactttccgttcggaagctcgttttatgagatcattcagttattggatggtactcgatttgtatcgtcaaggtcctaaagtggatgaaaatacgccagttatcggttatatcccggaagcctacgatgggattgggatgtttgattttatcgaaagcgaactgaaagaactggttgccgaaggagtttcatcagcattgcccgctaccaacgaatacggccgtgccagtaaacccgtggcatgggcactccttgcccgtctttatttaaacagcgcagtatatcgtggcaatgtggatactaagtattatacagaatgtattactgcttgcaaacaagtaatttccaatcctgcattctatctggaaccggaatatgccaaattatttaatgccgataatcacaagcgaacacatgaaattttgtttgctatggtgtgtgacgccacaacatcagttacgtggggcggaggaacatatataatttgtggatcatgtggcaattcgagcacacaagaccccgccaagtacggattgtccaacggctggggtatgtttcgtgcgcgtggtgagatgacagcaaagtttggagatattgctacaaccaaagacagccgcgctatgttttatacagaaggacaagcacagttctttaccggtgcaatcgataaccaagccgaaggctatttctttgaaaagttctccaatctcactgatgagggcgtagcagcatccaattctgctgccacaggatgctctaccgactatcccctactccggcttgccgacatctatctgatggcagccgaagcacaactaagaggaggaacagggctgtcgcgagccgaagcattggaacttgtaaatcaggttcgtttgcgtgcatataaccaggatgaaagcggaaaaatctcagatagtgattttacgctcgatttcattcttgatgaaagagccagggagttatacctcgaatcagtgcgtagaactgatcttataagattcaataagtttgtatcagcagattatatctggcaatggaaagggggcgttcttgacggccgtgccgtgaacaaaaaatataatatttatcccattcctgatacagatcttacagccaatcctaatctacataatccactctattaaaaagatacgatatgaaagtttttagtacaatagttaaattgatattattgtcagctgttatgacagtagctaccacctcctgtgatagcgatattgatccggtttacgtcttgtccggaaactctatggaattgatggggggcccgaatgaagttattcttacgccagacaatccgcaggctttggcattgacagtttattggagtggcgacggacgtttggcgcttagtgatacacttttgcaagctccggtgaatgttgcggaaataacgattcagttctcaaaggatgaacactttactgctccgttaaatattgcggtggataagaatatccattcccgtcaatttctttgcgaggagcttaattctctgcttgatcgtttaggttatgaggccaatgagaaggctccgttatggattcggatgcgttcggcattggcagccaacatcgctcccgaatactctaatgtcatggaggttctggtccagtcttatcgcattgagcttgtcttggctcaagtgcttgacaaggactggaagaacacatctatgatgcttgcctctcctgctgaagatggcatttataaaggttttatgggcgtcaacggatgggaaaactggtggcttcgcgaagccaataatgtaatgtggggtaatcttggtgaagaaggaaagacattttatgcttcatcggaagacagtcactggaacttttggttcccgaatccgtcaggatgctattacactaccgtaaacacggttgaaggatggtggagtgcgctgcatgttgccagtctgtcagttagtggagatgtaacgggcgaaatggcttacaacaagcagagcaatcaatggacactgccggtaaatctggcaacacaatctaccctgaccatttccgtatcaggaaagggtagcctgtacaaccgggaaacaaccgatataggacctgctattgagcaaactgtcgcatttggcggcaattcgcaaaacctcttgttcggtgagagtgcagataatatttctgtaactatgcccgccggagaaaatctcctggttcttgatttatccaatcctcttcaatttaccatcggcatcggagaagacgttccgcagccggaagtctctcagtatctgtacttctccggcataaccaattgggaaggttttgacgattacctcactttatatgatgaagccggactttgctatggtggtgcacattggatagattctgaatggggatatcgtgcatatactgaacaagcatgggagcccgcctataatgcagccgatggctctaccgacttgtccggcacattgatccttgcagagtctaaagacaacattcccgcaccggcacaagggctgtatgttatggatttcaacatgaagtcattgacctatgaactgactcaagtgcagactgtgacatttaccggacttaacgataattggtctgaatcccccatgacacagtctgcagaaaatccagagatatttacagccgagttcattaaagaaaagaaaagtccttggggagtaaaagtgctgataaataacaactggaaccttttcttcggcggtggttccggcattctgcacctgaagcattctgaatccttagcaggatttgacggagacgatgaactcgaaataggcaaaacctatgtccttaccgttgatttgggacaccaaacttattcttactcacttaaataaatcagtttcaatgaaaatagcaagcatattatcaatagtagcactcattgcttcaatggctacaaacgggtgtagtgaagatggcccggttacaaatcctcgtcaagaagaaccgcaaaaggttgtaaaagaagaaggctttgcacgtggtgcagacgtaagttggctgactcaaatggaagcggaaggactcaagttctacacgccggacgagaatcgccaagagatggagtgtatggaactcttgcgtgattattgcggagtcaactctatccgtcttcgtgtatgggttaacccgaaagacggctggaacaacatgaatgacgtaatagtgaaagcaaaacgtgccgagcgtctgggattacgtacgatgatcgacttccatttttctgatacctgggccgaccccggacatcaggaaatgccggaggcgtggaaagagctttcatttgatgatctcaaaattgctctcggcgaacatgtgaaatcagttcttaccgcgttaaaagcggttggggttacaccggaatgggtacaggtaggtaatgaaacaactcccggcatgatgcttcctgtggggtctgttgataatcccgaacaactgactgcactcaacaatgtgggatatgatgccgtgaaagctatatgtcccgacgccaaagtcattgtccacctggacgcgggaaacgaccaatgggtatacaaccgcatgttcgacattcttcaagccaatggaggtaaatacgacatgataggcatgtcgctctatccatattgggcagagcaggaaggcaaaaccggtggttggctgaaagtagccgatgactgtattgccaatatcaagcatgtcaagcagaaatacaacaaacctgtcatgatttgcgagataggtatgccttatgatcaggcagaggcctgcaaacaactcattacaaaaatgatgcaagccgatgtggaaggtatcttctattgggagccacaagccccgaatggctataatgacggttataacctaggctgtttcgataataatgcgcctacaattgcactagatgcttttaaaatccaataaaaaagtgagaatgaacatgaaacaccagaaacagttgtttactgtacttttgatgagcgcagcctgtatgctacaggcacagcgcagcgagacgctgcttgagaagaactggaaattcagtaaaggagattttccggaagctgtgcagactgactacaatgatactaaatgggaatcggtcgttatcccgcatgactgggccatcttcggacctttcgacatgaacaacgacctgcaaaacgtagcagtcacacagaactttgagaagaaggcatcactgaaaaccggacgtaccggaggactgccttatgtcggaaccggatggtatcgcaccagcttcgacgttcccgccgacaaagaagtcactctcctgttcgacggagcaatgagtgaagcgcgtgtatacgtcaacggacaggaggcttgcttctggcccttcggctacaactctttccattgcaacgtcacccctttcctgaataaagacggaaagaacaatacactggcggtacgcctcgaaaaccgcccccagtcttcacgctggtatccgggagcaggtctgtaccgcaacgtccacttgatcgtgacggagaaagtacacgttccggtatggggcacgcagattactaccccgcatgtcagtgatgaatttgccgccgtacgcctgcaaaccaagatagagaatgccggcgaaaagacagaaatccgtatagagacagaaatcctgtcaccggatggaaaggtagtgacccgcaaagaaaacaaaggccgcatcaatcacgggcagccgtttgaacagaactttatcgtcaacgcgcctcaactctggtcgccggaaagccccgctctttacaaggctgtatcgaaagtgtacgcagacaaccaactggtagatacatactctacccacttcggtatccgcagcattgaatacattgccgacaaaggtttctacctgaacggaaaacaccgcaaattccaaggtgtatgcaaccaccatgacttaggtccgctgggtgcggccatcaacgtagcggcacttcgccaccagctcacactcttaaaggatatgggatgcgacgccattcgtacttcccataatatgccggctcccgaactcgtggaattgtgcgacgaaatgggattcatgatgatgatcgaaccgttcgacgaatgggacatcgccaagtgtgaaaacggatatcaccgttacttcaacgaatgggcagaacgcgatatggtgaatatgctgcacaactatcgtaacaatccctgtgtagtgatgtggagtatcggtaatgaagtccccacgcaatgcagccctgtaggatataaagtagccaagttcctgcaagatatctgccaccgtgaagaccctacccgccccgttacctgcggcatggaccaagtgacttgtgttctagccaacggatttgctgccatgatcgatatccccggtctgaactaccgcgccaatcgctatcaggaggcgtatgacaaacttccgcaaaatcttattctgggtagtgaaactgcgtccaccgtcagctcacgcggtgtctacaagtttcccgtaaaagataagaaaagtgcccagtacgatgatcatcaatgttcttcttatgacgtagaggcatgttcatggtccaacatccccgatgaggacttcgctttggcggacgatcatcactggaccatcggacagtttgtatggaccggcttcgattatctgggtgagccttccccttatgatactgatgcctggcccaatcatagttccatgttcggtattatcgaccttgccagtctccccaaagaccgctattacttgtatcgcagcatatggaataaggaagcggaaacactgcatatcctgccgcattggacatggccgggacgcgaaggtgaagtaactccggtatttgtttacaccaactaccctgctgccgaactgtttatcaacggaaaaagctacggtaaacaaagcaagaacaacagttcactgaaaagccgctaccgtctgatgtggatggatgccatatatgaaccgggtgaagtgaaagtagtagcctacgataaagacggaaaagcagtagcagaaaagagtgtacgcaccgcaggcaagcctcatcacatcgaactggtcagcaaccggaacgaactgacggcagacggcaaagacctcgcttatgtgacagtgaaagtggtggacaaagacggcaacctctgccctgccgacagtcgtctgatcaacttctccgtcaaaggtgccggaaaataccgtgccggagccaacggtgaccccacgagtctcgacctgttccatcttccgaagatgcacgctttcaacggaatgcttacagctatcgtacaaacaaatgaaacagccggagaaattattctgactgccaaagccggcggagtgaaagcaggaagtatccgtcttctgacgaaataatcggtctacataaagaaatatatttgaaaaattgctgtcacctgtcaccaaacgagtgataatagtctgataattaaatcataagaccgtgacagcaacgtgtgacagcagtgtgatggcaagtattgtcgtcacactgctgtcacacgttgctatttcattttagctaccctctgcacttctactgatagtaagccaagttcgtttccctatttgaaactatagttcccattgcttgaaactttggtttcatacgctcgaaacttttagttttgtagtgtactgaataagttgacacttcaaaaatcgaaaataaagatgaaatattcgaaaaagcagtacaactattacagtgatgatgaacgaatgtcttatattcgtgagtatttatcaagtcccgagagcaaatctgagttttgtaagcgtaacggcttttgtgccaagcttcttacttattggcttaacaagtatcaaatagaagacaaagatatgggtagatcctctaaaccagtaaatagcgatgctattgattctagtatttctgagctccagaaagaactatcgctattgcgtgctgagaaccgtaaacttcatcgggctcttgctgatgagagtttacgtcacgaggcgtgcgaagaactcatcaatcttgctgaatccacgtatcatatcaaggtacgaaaaaactccgatgccaagtaatcgacaccttgtcacagaggcactcaccccgacgcaaacgtggttgtataaagttcctctgtgattacttcggcataacccgacaaggttattacaagcatgtgaaccgacatttggaggttgatatccttaccacaagcatcgtgttgtactgcaaagaactgttggaactcatgcccaaagctggtatgcgcgagttatacgcctgctgcgtgagtaagtttggaccaaagatggttatcggtcgtgatcgttgctatgacatttttcgctccaatggtttgtgtcaacgtacaagtcgcaagcgtcctaaaacaacgaattcgaaccataattactatatctaccccgatctgttgaatgttgcacccaaatttgtcgctacaagattgggcgctatggtagtggcggatataacctacgtaaacaccggtcagggctgggcttacctctcgttgcttaccgatgcgtcaagtcgtgccatcgtgggatatgcgctttacaaaactcttgagacggaggggcccttgaaagctttggagatggcaatatcattctatgagaagtatcacatagacatgagcactcttattcatcattccgaccggggtgtccaatattgctcaaataaatatgtagagaggcttaaagagcatcaaatcaacatcagtatgacgcagtgtggtgatcctttacataatgcattggctgaaagaatgaacaacaccattaaaaacggttggctattcgactgtgatgatgagagcttcgagcaagtaagcaagcgcattgaagatgctgtatatgtatataatcatgtgcggcctcatcaagggataaacatgaggacacctatggaagtggtcagcgaaacgggaggattaacagcataatacccgctcgtcgggacgggtggtcccgccccttgccgctagggcgatccccgaccgaagagtttttggttgttggcaacattacattttcctgaagaaggcttgcgtaaataaaggaagatgcataaatttgcaagcaccaacaaaagacaactaacataggaataagaataacaaaagtaaacctatttagatattaaagtatattgagtaaactaattcagttataacaaacgaagttgtcaactaaaaccagtacacatcatttcaagcctttggaactatggtttcttactaatgaaactgcagtttctcaccgatggaactctagtttcaagcagtggaaacttatcaagcggtttcttactgatgctgtatataatggatggaaccagtttatacccctatgccataacttcagggtggaagatacagatatgtaaataatattatcaaaaaaggaagaaaattgggatctgcacaaaaaaatgaagagaaaagtctctaaaaattaatactcctctctccatttatagaaaataaggacatttactgaatatccctaagtagaactgtattatactgctggccattatgaagactgtatcctctttgattatccttatttttttgagtctatatttgccaccaataagtgacaacagtcattttcttagtggcatatatattatcatttgtttagcaagacaaatcccttactttctaacacatcatataccacttgtttgtatggctctaaataaacgtttcctggtatatgctgccgaataaatattcgtggaaatacatttttgattaaccattttaataaatagtgatttgaccaaaatccataatatatatcttccacaaatgctccagacagtactttgggatagtaacttgtctggcctaaatctacataatctttatgtctaatttccgcttcctctaccattcttcctaatgcagttatgtataataccctagtatcatctgttttatatttaatccccatgtaaagaggaataaggctttttgcatcttcaagaattaaggtcatcaatcttacttcccctaacttgtctttagctatcaataaaaaagatttggaagagaacagcatatttaggttttcaaagaaggttacatttaaaaattcaaatttgttttctgctttgtttaacacattgttatataactccgtaaacaataatgtttgatttgcaaaatcggtcgatatctcccacatgaaattctcattaaatgctttttgcgaatcctgaaatcttttcctgtatttgctttttaacatctctgggtatttatggctacttaatactggaataacatttgttggaaacgatgaaaaaaagtaaaaatcatgacctaatattttttttattgaatcaatattacgccctctgatatctttaatgaagacaaacttcgattttgtctgtctacacttatttttcaattgcttccttactaaatcaaagacaatctgccttttttctgcagacaaagttgttttatactctataaaatgttcacagctagaagcatatgttcctgtaacaaaggctctaatcttgaaaaaatcaatatagacttttcttatcttttttaccacagcctttaccattggagatgtggtaagatttaagatgtctatttcataactaaagcatggaactattgcaacgacagtcccatgttcaaatatttgtaaataataaattgtaatttgctgaaaatcggatttttcaatagatatgaaaaaccgttgacttttaattatacttttgccgaatatatcttcccaatcagataaagtaatatcattaacagatgtactccattttatagagtagttatttgacaaatcttgaaatgtcatacttttcaaacagtttaatgattaattcaaccaacatatccatatctttctgtgtatgacttgccattacacttattctaaacctcgtcaaattcgctggtacagccggtggaaaaattggatttataatgaatccactatcaaaagcatcctttgccaattgagttagtatagcttggtctcctacgaccaaaggaataatgggagtctcagtattcattatattaaacccttcgcttttcaatttattttgtagatattcagcattttgttttaagtgctctacaatttctgtactttgcatcacttttattacctcaatagctgctgcacatacacttggcggcaatgaagttgagaacatattacttcttgcatatatccgtagataatcaataacatcttgtgaagccgttatatacccccccaccgttccgattgccttacttaatgttccggttaaaattatattttttctatcagtaatcccatagtgtgacaatgtaccagcacctttgtcccctattacccctgttgcatgcgcttcatcgacaagcaagatagcatcatatttccttgttatctccagaatttgtggaagttttgctatatcgccatccatactaaataccccatctgtaacaaccagtataccattgggatattgaggactattatcttttaacagtctttccaaatcattgatatcaccatgtttgtatcttatcatttttgcaccggacataacagtgccatcaagcaagctggcgtgatcaagtttatcatgtatgataagattatttggacgtattagtcctgaaataactcctaagttagctgtatattcagaagaaaaaaggatagtatcatccattcctgatattttagcaataagtttttccaattcttcttgatatatggatgttccagttaataaaggaacaccacctgatcctatgccaaactctttagttacttcgatggccttctgaattgcttcaggaaagatagttgcacccaagtaactgtttgatccgaacataatagcttgcactttttgttgagtatggcgattataaactgttacacgtctatcacaagcagtcaattgtggatgttttctataaacattcaactcgctttgctcatgcaatgccatttcttccttgaaatcatggactttacccatgatagatccatctttgctggttctatttcccgttaaatttacaatgtagctcatatctcagtgtattgtttcgtgcgttatacagtatatacggtacaaatatataacttttttctataaatgttgttatcaaggttgtttatattaaaaagtatatattttcttagttgttttctattaattatcagtatatttgcaaacagaacatactgataattaaaaaatatgcgagacggaaaaccaacaaaaaataggctactaatcgaagctttcaaattattcgcccataagccatatgatagagtaacatttgccgatttagaggaagtaacaggattaagtcgtggtgcaatattatatcatattaaaacaaaagaaaatttatttttaaatgttgttaataagtttatctttgatcgcaacagcgtttccaatctctcagagaaatttcactcaaacttaagcctttttatcactcaatttattgaaacttgccaaaaagaaaaggatgagatgctagagattggaatatcaaatgtcaataatgcaatgttaaacattgaaatatccgctttctatatattgcccaaaatgagagaaatcgccaatgaatggctgtgcaaggaaaagaacacttgggaaatcgttttaaaaaatgctatttctaaaaaagaaatcaaagatgatatcaacatagagctatttgttgatttatttcagaatatatatttgggaacatcttttgcaggagtcgttcatgaagacggatacaaaattgatcagttgaagagggaatttatgcagatttatcaattaataaaaaaataacgcaactatatactttattgtaccaacggttgtgtataactctttaatgtgccaatcgttattacatctattattctcattacaaataatataatcacatagtatttattggctttacaccaatacaatgtctcttgatttagctgagaaaacacaaagtacgccacaatgactgccagtttggcagatattgtggcgttaaagattatttgtattaattggtactgtttttgaaagttattatcagtgtcatcggcattccgttttgcttaaaattcatttttttggatataacggcagtttacacctatctttctgaaatcaagatggcggagttccttccgttgaaaagggaaattcacatgtttaactaaggaaaatattattatgggtattaaaacaggcccaaaaagaattgctatttccacaggaaaacctgaccgtcgtcaaagagacaacaagcaaactccaggaaatacaccatctttgaaaccccatattcataagaagggggattaaactccaaataaaaacggatgcctttggctgacatccgtggagtaaaatgttaaagttcatccttatcgtgtagcaacacgattttgaggtctatcaaagcctttgtcattttggcactatgacgatggcttttttcataatggtgcaaatataactcatcaagatgaaataggttttgttactatgaaaaaaataagatttattattattacaattatactatcctacaacatttggtttcaaccaattttcgagtaaacttaatcattttcttcatttgttgtttctttttgtttctcttctgattgactatctgccattttagcaatttctatttgcaacgtattctccaacgtttcattcagggtttctataagtgttttcatttcgatacaattttgatttgataaaatatgtatttactctcataaagcaaataaaaacctacgttttaatgctactaacaacttaataatcagttgctattaaattttattgtgaaaattcttaagattcttctccagaactgaaattatcctcccattgcatgtacaatttctctattaatcaataattgtacacatgaaaacattcaaatcgtcccaccgaatgctacaaagtttgaatactgaagagaaatgtagagagtatcttgaagagttgaggtggcatggtgagcctatttgcccacattgtggttctatttctaagcatcattataaactaactcaaaacggagagtttaaaggtttgtataagtgcaaggattgccgtaaaagatttacaattacaataggaactatgtttgaaggttctcatgtacctttagaccaatggttctatgctatttctattttcctttcattcaagaaaggtcttagcagtgcccaattagcaagatctatcaacgtaactcagaaaacagcatggtttatgttacaacgtattcgtaaaaacatgaaggatgatgatgcaacctttgatgatatgacacaaatggacgaaacctatatgggtggcaaaaccagtgcaaagcaccaaggacgtagaaaatgtaaagtttctaaaactggcaaaaagaatataggacgctccgtagcaactaatggaagaaagtatcattagtcccaattatgtaataatagtgggaaatgctggttacatagaaaaagtagaaatctaaaatagaaggagaaaatgcccaaaggtgcaactcgttttcttcatataatctcatcccagtagttgtgggataattcattaaaatatgaaaataaaaactttttatgtgatggtaatttgcaccagtttatcgttaattggatgtgacaaggaggaaatagatgcaccaataacacctcccattgaaaaaccagatgaacctattgcttcaccatctaccaatgacattattaaaattaaaacaggagatatagatatgataataggacacaaatgattggcaaggcgttacttatggtaatggaagatatgtagccgtaggatatggtggatatattgcatactccatcgatggagtgaactggacatctaagcaagtaactatgcatggaatgatattacttatggtaatgggaaatatgtagcagtcagtggtggtgtgattggttattcttctgatggcgtaaactggacagccaaacaagtaacaggcatgtggttatatggagtggcttatggtaacggaaagtatatagcagtaggtggtaatgaaagcattagttatatttgttattccacagatgatgtaaactggacgaccaaacaagtctcctgtcgttacttatatggtgctacttatggcaatggtaaatatatagtaatgggtgatggaggatatattgcatactccactgatggaattaattggacatctaaaatcgtaggattaattacttgggcaggtggtgcttatggcaatggcaaatacgtagtgattggtaataatggctatattgcatattctacagatgacataaattggataatgaaagggtgaccaggtaatagtgaattgcggcagagtattgtttatggtaatggcaaatatattgctgtaggctatggcggttatattactaattctacagatgctgtaaactggacaataaataaaatagaaagcgtacgcttgaatggagcctgcatttatcaatagaatgtttgcgctatgccataggtaattgaacttcatatcaaaatattagtagggcatgctgggaaactggcatgccctatttttgtcatattaatcgctattggggggaataagaaaataaaaggaattgttaatcaaaaagggcattgtaataaaagggagctatcactttattaaattatcaatcgtttgaattgtttttagtaactttgttctttgtatttaataactcattaacaatctaatatttatgtattatggaattaaaaacacttcaatacttttctcacaacttaacagatccaattcatgaagtatttcaagttttggataaccctaatcattcagaatataataagctactccatgatatgaaatctataaatgcagaagaactctctttatttgttattgaaaaacaaattgatttctacattaaagatagttttaatattgatatagagagaagggcttggtttctaatcaatcgtttgcatagggatattgcgagtaaaagactagatgaattatcaggaaatggagtgagacttaaaccctataactcgctcaatctgaaagagattttaatcaatgatgaaaatcttgttgacatttctttttttgatttgaagcctattggaattgttcataataactttggttatcgtttatgtccatcaactaatttagataattctacttattggctattccttgaaatcattaagcttgtacttaaaaacaaaaagaaattctatatcagattagatccgttcattgagatacctatcaaagattatactcccatggcatataaaatgacaattcatggaaagccactaaattgggaccgaattagaaatctgcaaaatgatgattttggacagtttataaatgaaaaagaggatagtgattatagtataaccgactatgtttggaatgtgaagaaaaacgaaatacactttacatgtgaagagttacctgcaattggaaattgcacaattagaggaagccgatatttccatgcgatttttaataaggatacgggctctattatacattgtgatggagctattagaatttatagtgaaagtgagcttgctgatagaatgagatttcatgttagaagttcagacgtgagaaaggtaggaaagagagtgaagatatttcaaacaaatgattctttaactcaggaggagttttctcatttagtaatgagttttttcgtctggaatcaagatgtcgtttcgtactttaatacatgataatacaaaagttatattgtaaatgcatgatatttatatctcattatattgatgtaaagccaacaaatactatgtgattatattatttgtaatgagaataatagatgtaataacgattggtacaataaagtatatagttgcgttttgattggtgatacgatgaagacgactatatcaactccttgttctgatacagtctttttcatcgaagggaacttggtattcacttcagaggacatatttaatcaacaagcacgtaatttctaatcttttttttaaagtattgatcagaagataactgagtagcaataaagtcgtaactattcagccaaaagaatgtgtaaattcactcctttttattcttactattgcaacgatattgcactaattattgcgaaaaatgagcaaaacataaattgatgttttcgccacaatgcccctataagttatagatgtatgcaagctattgataatcaatggattttccgattggataattattacaaagccatgtattagttaatattatataaaacaaagcaaaatcatacagtacatactgtaagtttcatatatttgcaaacaaacagtctatcctgtcaattaaatacatttttagtaaaacgcatctgaatgagaacagactgatggtaaacacattgaagcaatgtttgtagaatgtctaaaattattttttgtattctaggaacacaaaaatataagtaatgtattcaaaaaacatcttgtgcataatgagatgattgtaagattgttgaagaattaaagagtaaaaattgtaagtccaattgaatcaatatttcaatgaatataatagaatattagttatcggtatcaatattacagacctaactttataaaaaagaatcagctgcataaatgtttatggaataggtctgataaagagatttttgaatttaagtttatttgattaaaaaaattaatgttatgaaaaaattaagttcttcaaagctggtattagctatgctttttgctgtaattagcatttctgctaatgcccaacttaaaatgtcctctaatggatatttaacttttggtcctacaagtacatataatgatggaaccaaagattataacattacactgagaggaaatatttggttggctggacccaatgtaggacatttcttacagatagacaccaatcctgctgcaactcgaatagcaagtcactatgaccaaattatattttataatacaggtacgaatacatataatagtattcaagtgaagaatgtatacaactactccgacttagcagcaaaaaagaatatccaaccattaggacgtagtataaatagtgtatctaaactgctacaactcaaacctgttaagtatgattttcaagacagttcagatcgcagtacttttaaagtcggtggcgatgggaaagaaattggattaattgctcaagaagtggaattagtttttccgaatctcgttttaaccgatccggatggaaaaaaattaattaactacacagcactaattccagttttaattgatgctgtcaaaacattaaccgaagaaattaatacgctgaagagtatgcagaaatgatctgctgtacaaaaatcttttattgacaatgcgaaatctttatctaagtgccctaaacactaaaggctccattttatttcattaacaattttgttcaagggacagaatggtgcctttagttattttacatccattacaatatgaaagaaagagttgtggaattggattatctgaagtgcatccttattttattaatggttttatttcatctagcttattttagtgagaaatatccattgctgaaacaattcgtttatgcatttcatatgccggtcttcttgatattgtcaggttatctaacaaatatcaataaaggaactaaaaaaaaaatccgggaaattttatggctattcattccatattcattaatggaagcgagctatgtggttacagcatcagtcttacctattcgagaacattttgatggactcagcatagaacttttaattagaaaggtactaatggaacccatggggccatattggtacttgcataccctattggtttgtgaagtaatgtactatgtggtatttctatttaagaagataaagcccatatcaagattttttattctagcagtttgcttgttcttgttatctcagggggatttcaaattgttgatatttataaatgcaatatactttttagttggggtgtggatgagacaaagcaatttttcttttctgattatatttcaagcatcattctgggcaattttaccgttatgtattatttgttataatacggataactttagtagatcagagatgagtgggatagccataatttatttggcaacatgtataatcttggaaacacacaaatatatttccgggattctaaagaaagtcacttattttataggaaagaatacgcttgtgattctccttttctctcccatatttactattctgtccaagttattaatccctctattcacttttgatagaacggggatatgtttcgcatctgtttcagtggcttttgtcacgataggatgttttgctatttcatatatcatggattattttcatctatcaagatttttcgtaggcagagatcgaattcttaacagaataagtaattgattgataattattgtgtcataataatgaatgaaataaaatgaaaaaaaatgcagttttattatatggtttgttttcagcctttatgttgatattccaaacaggatgttctgacaaaatagaaaacattagtgatatgaatgggaatgaggtttctactcgctcactgtcttttactgattattattggtataatgggcaaaaaatcggaataaataaattgaataacaaaaagtatattctttttgatgagaataacgaaaatactttaaaaagttattctgcaacaactctgaagttcgtaaaagagccacaattgcttcaactttcaaataagataatgaaaaaaaagctgcaatcttcacccaaaaatcttaaatgggctacaattgagacaacggcttcatcaccgaccttaaccaaactaaacggaataatttatgaagccccatattttcaaacagaaaatggaactgaagtaggattgagtcacttgtattatgtgaaattaaagtcagacaaagacgtctctaaacttatggaactagcatctatcaataaagttgacataataggtaataatgaatatatgcctttatggtatacattatcatgctcaaaagaatcgactggcaatgctttggaattagctaataagttttatgaaacaaatttgtttgaagccagtgaaccagacttaatgagtgatgacacacctaattgtgtcaatgactctaatttctcaaattatcaatggaatttaagaaatacaggtcagaatggaggaactataggagttgatgtaaatttttgtaatgccagaagtataactactggaagtcaaaatgtaattgtagctattgtcgaccaaggcattcaacttgatcatcccgacttaaatgtacattccatcagttatgatacagaaagtggaacatcacctagtagagtattgggcacccatggcaccaattgtgcaggattcattagtgcaaaaacaaataatagtattggtatcgcatccctcgctccagattgcccgtcaatgtcaattagtaattcattggcatcttctccggatagtagacaaaagagagctgacgggattaattttgcatggagaaacggtgcttctgtaatctcaaattcatggagttcaagtgttgcatattcaataattaacgacgcaatctcaaatgccttaacaagtggacgatctggaaaaggatgcgttgttgtgtttgctacaggaaatgactactcatcaacagtgggttatcccgctaattgcaatccagatatacttgctgtaggttctaataaccgaaatggttcaagatcttcttttagcaattatggcacagcattagatattgtagctccgggagaaaatgtatgcacaacaacaactggaagtaattattccacttcaataagtggtacctccttttcctgtcctacagctgctgctgttgcggctttagtaatatcggttaatcccaacttaactcaaaaacaggttgttgatattctagagaaaagcgcacgaaaagttggaaactatgcatattcgacaacgtctaacagattaaatggaacttggaataatgaaatgggatatggtttgctagatgcctatgcagcagtatctttagcaggcggcgagaatgtctattttaatgaccaaacggtatcatacactcaaacagtttctggaatgaacatcttttctcaaaatgttactgtaacgaataatgccaccttaacattcaattttattcaaactgttatcattaatccgccatttacagtaaatgccggatcgcagttcttcttatattactaaagttctagggtgcccagtttgatgttctcattttagagaagaatttaacagtacgataacaattgcattaagaatgtcaaactgaacaccctaacattttgccactatttataacttagataaggagcatctttcttctctgcctaactgattgtactttgcacgggcaagtattgtaaattttcctctaggaaattttgcataaaagtgaccaagagaagtattattcatttgattcgatagatataaataccatcagtataagtataaagtattaaaatatcatcatattgttcaatatcaataattccacctacacccaataaatcggcttgataaagtatagaccatgtatcaccaccatcagtagaatgatgaattgtaaatttatgttcttctttaggaatacgggtgactccagtagaatatagtatttgtggatttctcttatcataaattgttttgtaaaaatatacatcatccttcaaaacaggattccaaatccgacctttatctatagttttctttaaaaaatattcccctgaatatatcattatatttggattagttgggtcaaaagctatatgatgtatacaattatttctttcattctcaagtattatccaatctttcccatcattacaagaagcattaataaaagattcaaatatcatagtttcccctgtattgtaaatatttgtagtgtcttgaggatgaaatccaacaaaccaattctgatagccgccataaaaagtactgatagtcttccaactttttccaaaatttaccgatttcactactccaataggttcgaccaaagccaatagtgaattcgcattttgggagttttgagatattgagtaaggtatgacctttaactcattctcttcaattaaaaactccggtggcgttatcgccttacaagtttttccaccatctgttgaaagcacaaatgccttctcgtcagtgcaagctgtaattgcaattatagaatcccccttcataacaaactggattactggaagaccggagaacgcaaacttttcccagtccatgttattcaacgacttcgctggctttcgatatatccccgaccacgttgctatgtaaatatatccatcaactacttgaacagacggtctataaggacgcccataagtattccaaactttttcttgggcctctattacatttgctttatcttttaatccaatatattcaaaaatcttctcgtcgtcagtaatttctcgtaggttattatcatccttacaagaaataaacataactgataaaaacaaaattaaaaataatgatttcatttataattgctttataattagtctaagtggtgattacaaattaatttaaattatgcgtatattggtttgtctgcaggacgagtcaatattcattatatactaaaatcctttagaacaaacctttatattatctaaaatattattggattgattcttttcgagagaatccctataaacaaattgtttgaccatattaaaaatttaaatatagaaccaataaatgaaaaccagctatctatctggtagcatttatatagacactagtatagttaaacatttgcacactataatcaaataattgagtagcaagcacaatagcaatgcgttaaataaaaacattcatttcacagtatatgtgcatatcattgcattcttcacaatcattcataccaaataactattgcaaatatataataaataagcagtacatgctataaaacacagcctacttcttcaagattaactagtattagtattttcaacgtaaatttagtgccactcgttgccacccaatgcgcaattctcattaggaaactacgtatatcagattgaacgtgtagctatagtcatgtgtgtataatcataagatagaaaagaagaaaaggctggcggcataatcagcgctaatacatgaaaaacggaaaagtttattaacttcctgctaaaaggcaggcccctacatcatgatttcaggatgtaagatacagatatgtaaataatattatcaaaaaaaaaggaagaataattgagatctgtatataaaaaatgaagagaaaaatctctaaaaattaatattatcctattcatttatagaaaataaggacatttacagaatatccctaaataaactacaacgagtggcaacagcgtgacggcaaattctgccatcacactgctgtcactcgttgccgtcaccatatttatacctaaaaatcaacctgttacatctaaaacagtgacaggtgacagataatatttgtttttatttatataggatgaagaaaatatagatgctactgatattatttacagataaacgtaaccaacaatcctttgtgatcggttggccatacatcaagcggcaataagaacttatctttggatgtctcctgcacgcgctgtgcgcggacaatagaacctttcggtccgaagatgaccgccttccttgcatccagtccttcgcctttatagaaaataaagtcgatccggtcccgctcgtctgctttgggagcccatgtgattttctccggagtttttgccggattgtccgaaggataagtaaagccgggatgtgtcaagggattgggatatatcttgcggtaactatctacaaatccggcttcttcgagcaaagtcgttaccgtccagggcacaacgaagccattgtgatcgtacatatctttattcttttctatccagtcacagtgagacggttcgttaaagtcaccgccgataatcactttataccctgctgccaggtctttctcagcctgagtgataaacaaacggatagcatcgtcacgctgggaagcaacgtttactttcagtatctcttctaccgatgccggcaacggtatttccttccaggtagaaccgtcatagccgcgggcattgtagtatgcacaatccagataatccagatgtgacgtgtaaaccgctaccttatgcccgtttaccgaactggtcaggcgatagatacttccgtgatcgtctttctcgggaaaaacagtcagggaatcggtgataggatgtttgctcagcagccccgtgtcataactataaaaagaataatacgaaagccccttctctttcagcgaagcacagacgcgggctgtgaaattcgtcttattgtaattcctgacttcactgaaagttacaaagtccggtttcaggcgaacaatctcattgacaatagcgtcatatcctcccggtaccatcgtaccttcctgccatacattccattgcagtactgtaaattcattactcttctgacttcgtgcaaagacggaaacaaatagtaaaagtgtcgtaaatagtaagttggttaatcgcatttcatttattatttagcgtgatgtatctttaaatagctttccagaaagactgaaaatcacggtatttaccgtagcagaccagttcgtctccttcttccaccttttcatctccgggcaactcattcttgacatgacgctccatcaaagaaatgcccaggcaattagtgactttgttcgcacgcttcagtgcgatcagtttcagatgaaactcttcatccatattcagctcattcacaaagtatcctacaaacttcttcggaacagtaaacttcacgacataataatcctgatcaatacggaacgcttccatcgtcgccccaaagtcgagcaactgcaccaggctacgggcagcatcctcttccggtgtcagaatcttctccagactaaacgcttcaagcactgccttgtgcaccgcatcaatggcacgggcaaaaatacgaggcacctttttctgcttcaacaacgcgacaacacgtaccgatgctccaaaattctcgccaatcgccacaacaacaatatctacgctattcaaaggcagcaccgacaacgactgttcgtccgtagcgtctatgacaaaagcagtggcaaccttatctttgattgagtcgacacggctttcgctgatgtccgctccaatgatctcatgccccaatgccgataattcctcggcaagtacatgcccgtaatttcctagaccaataataatatacttcatgatgttagtttatgatgatgttatcactcggataacggtattttgtattctttttctgcttgacgatgcccagcatcaacgtaatcagaccgacacgtccgataaacatcagcaacgataccagcaatttactggcatcgcacaattgaggcgtcagattcaggctcgatcctaccgtactaagggcggaaacacattcaaaggtcagtgccagcaaagaggctttcggttcgagtatgctcaatatgaagatgaagagaaacaatacgcccagcgacatgacgaccgtcgcattggaacgccggatagagtcatgagacaattccctgccgaagacctccacccgctcacttccccgcaatacggctacaaggttcaacactaccactgcaaaagcattcactttgacaccgcctgccgtagactgcgaaccgccgccgacccacatcaggaagagataaaccaacagcgtctgcacgctcaatgatgccagatcgacactgctaaacccagccgttcgcggacaggtcgcattaaagaatgcttgcgtccatttatcggccacagacataccggcaaaagaggcattccactcaaaagcagcaatggccagtgtaccgatcagcaaaagcaggaaagtcatgatcaatacgattttcgtattcagattgtagaggtgctgcatcttatgtctttccagtttgcgggtacgcacaaacgtccagaaatggcgcaaatggtataatacgatatctttgaaattaaccagaatcggaaagccgataccgcccaagataatcagtaaagagacggagatgaacagccagttgtggttggtcatcaccatcgaatttcctaaattgcctgaaagtgtggagaaacccgcattacagaaagccgaaatggaatggaaggcggcaaaagccagttcctcttccagattcatcccaagcgtatcgtgaatgctgaaccagatggacaccatgccaatgccttcgatgaccaatgtaaatccaaggatatatagtagtgtggacagtaacgaccccaacgaattggaactgaccatatcacggacaacgagctgattgtaaatggaagtatttcccataaagaacatggcaaagaaactggttaatgtcatcactcccagtccgccgatctgaatgagcaggataatgactacaagtccgctggtggtgaaagtggtggatacgtctaccggcaccaagcccgtcacacagacggcactggtggctgtaaacagagaatcgacccaagtgatgccattgaccgtacatcgtggaagcatcagcaatcccgtcccgatcagaataatagccataaagctgacagccagtatcaaagacggattcgtacggcgtcctaaaagacgcaccaagccattggacaggttcagcagagaaaaaaccaacaataatattaaatgataaaacttcccgtgaaggaattcccagacttgcagaattgctccctcttcttccggacgatggaagatgacgggaaccaaagttaggtaaagcaatacgctcaatatccatgccagccttcgatattgctttttcgtattccggtattccagcgaaatatgcagggtaacatcaattaaaaagataatccatacggctttatacaagatctgtatctgctgtacctcgaccggggacaatggaaaaccatgttcgtaaaccactccgacaatcaacaacagagatgccagataagtgagcgcttctaccaaccccagcaggatacgtacatagggcttgagaagcttattctgatataacagaaatttatgataaatcttcatatcacatttttttattgtcgtatttgctatgccgtgcaaacttaactaaaataacaatcgaattcgattctttgttgacaaaattacacgaatattaaaaattttgcctacttttggcagcagaaaactaataaaccacaataacatgagtgacaaaagaaaacggtatatcctaccggaagaagaaattccacattactggtacaacattcaggctgatatggtgaacaagccaatgccgccgttgcacccgggaacaaaacagccgctgaaagcggaagatctgtatccaatctttgccaaagaactgtgtcatcaggagcttaaccagactgacgcatggatcgaaataccggaagatgtacgcgaaatgtataaatattatcgtagtacgccgcttgtacgcgcttacggactggaaaaagcgctcggaactccggcacatatctatttcaagaacgaaagtgtcagcccgatcggttctcataaactgaactctgcgctggctcaggcatattattgcaaagaagaaggcgtcacgaacgttactaccgaaaccggtgcgggccaatggggagccgccctttcttatgctgccaaagtttttggtctcgaagccgcagtttatcaggtaaagatcagctacgaacaaaagccttaccgccgcagcattatgcagactttcggcgcacaggtcactccttctccgtctatgtctacccgtgcgggaaaagatatcctgacggctcaccccacctatcagggttctctgggtacagccatctcggaagctatcgaacttgcacaaatgactcccaactgtaaatacactcttggttcggtactcagccacgttactctccaccagaccatcatcggtctggaagctgaaaagcaaatggaaatggcgggcgaatatccggacgtagtaatcggttgtttcggaggcggttccaacttcggaggtatctctttcccattcatgcgtcacaacatcctggaaggaaagaaaacgcgtttcgttgctgccgaacctgcttcgtgcccgaagctgacccgcggtaaattccaatatgacttcggtgatgaagccggatatactccgctgctcccgatgtttacattaggacacaacttcgctcctgcccatatccatgcaggcggtcttcgctatcacggtgcaggcgtcatcgtctcccaattactgaaagacaatctgatggaagcggtagatatccagcaactggaatctttcgaagccggctgtctgttcgcacaggcggaaggtattattccggcaccggaatccagtcacgcgattgctgccgctatacgcgaagcaaaggcgtgcaaggaaacaggagaagagaaagtgattctgttcaacctgtccggacacggtctgatcgatatggcatcttatgacaaatatttggcaggcgatttagtgaactacgcactgactgacgaagatattcagaagaatctggatgaaataggagacttatccaagtaagccccggtttctgaaccgaattctgtaagtataaaagcccggtatgatgccgggcttatttattatctctacgaaactatccaaaagaatacagtcttttgtactttattcatggggtatttaaaggaaattactatctttggcgtcattattaatctcgtgaactaataatgagcaagcttaagaagatagtaatctacttgtttttcctatgcttaggaatgcattccgccttttctgaaactccggaacaaatcacattttcctatatttccatcaatgagggactatcacaaagtacggtgttctccatcgatcaggataaaaggggcaatatgtggtttgccacttatgacggagttaacaaatacgacggatatgcatttacggtttatcagcataatgaggatgacccgaacagtatcgccaacgacatctcccgtattgtaaaaacagacagtcagggacgggtatggattggtacacgtgatggtttgtcccgttatgatgaggaaaaagacatattccagaacttcttctatgaaaagaatgggaaacatttgcaagttaacggtatcgaagagatttcaccggaacagttacttatcagtactccggaagggctgatcatgttcgatatcaaagaatccaaatttatagatgattctttcagcacagcgatgcataagacaatcgcctccactctttacagacagggtgaccaaatttatatcggaacttcgaccgacggactctatacttactctattactcagaaaacttttgaaaaagtgatccccattttagggactaaacagattcaggctattcttcagcaatcccctacccgcatctgggtggcaaccgaaggagccggactgttcctgattaatccgaaaacgaaggaaataaagaattatctgcattctccttccaacccgaagagtatcagttccaattacatccgctcactggcaatggattcacaaaaccgtttatggatcggaactttcaacgacttgaatatttatcatgaaggtactgattcttttgcctcgtacagcagtaaccccgtagaaaacggcagtctgtcacaacgttcggtgcgcagtatctttatggattctcagggcggtatgtggctgggaacttatttcggtggtctgaactattatcaccctatccggaaccgcttcaagaatatccgcaatattccttataaaaactcgttaagcgacaatgtagtaagctgtattgtcgaagataaagacaaaaacctgtggataggaacgaatgacggaggattgaatctttataatccgattacacagcgatttacatcttatacactgcaagaggatgaaagtgcaagaggcatcggttccaacaatatcaaggcggtatatgtagacgaaaagaaatctttggtatatataggtactcatgccggcggactgagtatccttcaccgcaacagcggtcaggtagaaaactttaaccaacgcaacagccagctggtaaatgagaatgtctatgccatccttcccgacggagaagggaatctttggttgggaacactcagtgcactggttcgttttaatccggaacaacggagttttactacgattgaaaaagagaaagatggcactccagtcgtctccaaacaaatcacgacactattccgcgactcccataaacgcttatggatcggtggagaagagggactatcagtctttaagcaagaaggtctggatatacaaaaagcatccatacttccggtttccaacgtcacgaagctctttacgaactgtatttacgaggcttccaacggaatcatctgggtaggtacacgcgaaggattttattgtttcaatgaaaaagacaagcagatcaaacggtataacacgaccaacggtctgccgaataacgtagtatacggtattttggaagattccttcggaagactctggttaagtaccaaccgggggatttcctgctttaatccggaaacggaaaaattccgtaactttacagaatcggacgggttgcaaagcaatcagttcaataccgcttcttattgtcgtacgtctgtgggacaaatgtattttggcggtatcaacggaatcacgactttccgtccggaattattgctcgacaatccttatacgcctccggtggttatcaccaaactgcaactgttcaataaggtagtccgcccggatgatgagaccggtattctgaccaagaacatcagtgaaacgaaaagtatcacactgaaatcctggcaaactgctttttccattgagttcgtggtatccaattatatctcaggacaacataatactttcgcctataagctggaaggttatgataaagaatggtattatctgacggacagccgcaccgtctcctactctaacctgccacagggaacctatcaattccttgtcaaagctgccaacagcgacggcaaatggaatcctatccctacagcattggagattatcgttctgccgatctggtataagacctggtgggcactactcatcttcttcgcaaccttcgcaggtttcatcacttttgttttccgcttcttctggatgcgcaaaagtatggaagcccagcttgaaatagaacgcagagacaaagaacatcaggaagaaatcaatcagatgaagatgcgtttcttcatcaacatctcgcatgaacttcgtacacctttgacgctgattctgactcccctgcaagagatcattaacaaaatcagcgaccgatggacacgcaaccaactggaatatatccaacggaatgcaaaccgcctgctgcatctggtcaaccaattgatggactaccgccgtgctgaactcggagtgttcgaactaaaagcgaaaaaaggaaacgctcatcaactgatacaggacaacttccttttctacgataaactggcacgccacaaaaagattacttatactctacactctgaactggaagacaaagaagttctttttgatgccaactatctggaactgatagttaacaacctcctttccaatgcctttaaatatacggaaagcgggcaaagcattaccgtaactctgaaagaggagaacggctggctattgttgcaagtcagcgatacaggcataggtatccctatcaacaaacagggaaagatattcgaacgtttctatcagatagaaagtgagcacgtaggaagtggtatcggactttcgttagtacaacgtctgatagaacttcatcatggacgtatcgaactggacagcgaagaaaacaaaggcagtacattctctgtctatctgccacaggatctgtcggtttacaaaccttccgagttagcttccaataacgaacaaaatgaagaagagcaagtgtattctaccaattcgaaagcaatgtatttcatcgacacggagaaagtggaaaacgaatctgtggaatccggtgataagaagcgcggaacaattctgatcgtagaagataataacgaaatccgccgttacctgagtaacggactggcggatttgttcaacacactggaagccgggaacggtgaagaagcactggaaaaactgaaagacaacgaagtggatgtgattgtcaccgacgtcatgatgccggttatggatggtatcaagctatgcaagaacgtgaaacaaaatatccggacttgccatattccggttattattctctccgcaaagaccgatatcaaagatcagatggaaggtctgcaaatgggtgcggatgactatatccccaaaccattctctcttgccatcctgacaaccaagatacagaacatgatgcgtacacgcagacggatgctcgataagtacgccaaatcattggaagtagaacctgagaaaatcacattcaatgcaatggatgaagccttgctgaaacgtgccatggcgattgtggaaaagaatatggataacatcgaattctctaccgacgaattcgccagagaaatgaacatgagccgttctaatctgcatctgaaactaaaagcaattaccggagaatcaaccattgactttatccgtaagattcgtttcaatgaagcggccaagctactgaaagacggacgatatacggtagcggaagtcagtactatggtaggattcaatacaccgtcatattttgccaccagtttcaagaagtacttcggatgcttacctacggagtatatcaagaaatcaaaaggataaccttctcattcaaggaaagtatgttgttagacaaatttgatatataattcattaaaactaatagtagctaatttgtttttgaacaaagtatagacgttatgaacaaagtatagacgttatgaacaagtattggctgtataactctctacatttgtatagagatatcagaaccaaaagaatataaaccacattaaaggaaatgtttatactatgagcttcaaaaaacgactttacatctatgtaattttatcattcatcagtatgggtatagttaatgcacgttcaataactatacaacaaacaattgactggcccgaattcatgagcagtcaggatatgatatgggaagtactgcctgaatattggcacgaatcagcctatctgggaaatggcaggctgggtctaatgatttataaagaaccggaaaaaaactacatacggttcgaaaccagtaactgcgatgtacacgaccacagagaaaaaagagacgtattcgggacgccccgattactcaccggtcactttgcattacaccccgaaggggaaatcatcagtggtaagatgcgcctcgacctttggaacgcagaagctacaacagatattgtcactaccaaaggagcgatccatttaaaaacgtttgtccatgcagacgatatgattatgatcgtaaaagcaacgacagaaggagaagaaaaaaactttcagtgggaatggattgccgccgaagctaatagtccccgttatcttttcttcaagaatcaagataaaatggacaaaattccgcaagactatcaactcaatcctgctgctgaaatcagtcaaaagaatgatataaacttatccacccaaaagttacttgccggtggtgaaacagtagtaggatggcaggaaagcaaagctgaaaaaggagaacgcattctgtggataaaccttacacatacatttccacagacaaatgccggagaaatatgtatgaaagaaataaagaaagccgggcgtcaaggatttaaaaagctacaaagtacgcatcgcaaatggtggaatgcctattatcctgccagtttcatcacattgcccgaaatccaaaaagaaaacttttactggatacagatgtacaaactggcttccgctactcgcggtgaccgcgccttgatagacaatacaggtccctggctgacagaaactccctggcccaacgcctggtggaacctcaacgtacagctaacctattgggcattgaatgcctctgaccatttagacctggccgcctcactcgaaaacgcactttacaaccatatagacgaactacgcctcaacgttccttctgcctaccgttctaattctttagggattggagtggcttccaatctggaatgtatgtcaacggaaattggtattcccggcaaaggtaaagcacaagtaggattattaccatgggcatgccataacctctggctcatctaccgccacaagatggatgataatgtgttacgcgacaagttattcccattattaaaaggtgctgtcaactattatctgcacttcctggaaaaaggcgaagatggcaaattgcatctccccaaaacctattcaccggaatacgatgccgtagaagactgtaacttcgatctcgctttgctacgttggggatgtcagaccttacttgaatcagcaaaacgtctgaacattcaggatcccctgatggaaacttggcaaagtgttctttatgatctggtggcttatcctatggatgaaaacggcttgctaataggaaaagacatgccttatgccttttctcacaggcattactcacatttacttgccatctatcctttatatctgctcaacactgaacaaaccggtgctgttgacatcatcgagaagtcactggccttttggcaaagtaaacccaaagcactccaaggttattcatgtaccggtgcttcttctatctcgtcagctatcggtaagggaaatgacgcacttgcttatttgaataaattattcggaaagtttcttagccctaccactatgtataaagaagcaggccccgttatcgaaaccccgttatcaggtgctcagtgcatccacgatatgttgctacagagttggggaggaaaaatcagaattttcccggcagtgccggatgcctggcaggatgttgcctactccggtttacgcacagaaggagccttcaaagtttctgccagcagaaaacagggaaagacggaattcgtgcatataaagagcctggccggcgagccttgtatagtaatgaccgacatctctaatcctattttcacaggaaagagagactttataataaaatctgtcaataatggtacttatctgattgacttaaaaaagggagaagaaatcatcatgtatcctaaaggtacatctccagattttagtatctcacccatatcacatatgtctcaaaactattttggaaagaaggcaaaataacctattgaaatcaacatgtaaaggagctgcttgaatgaattttaaaatcatccatttaagcagctcaaattgtacaaaaggtatcttatgacactatgtagagatattacattctgatatctaaaaaactaaaattcagagacaaaaccacctttttgaacaaaaatagcatatgtctcaacaaaattaatatcaaaaaagtcatttttgaacaaagtgtggacaacataaattaagaatcatatttaatgaagttacatttgcaacagtaaaaatacacttttaataattataaaacctaataaagtatgaagaacatcttctttatttgcatttgtgccttattcgcttttaccggatgcacggatgacgatgatgaactattggcaaatggagacactaacattaacttgcttcctaatcctcaaccgaatggcgtaattaatgaaaagttattcgaggttatcaacctggattatccgggtctggaaaaggtgaaagagtattatgaagctaatgagtattattacgctgctcatgagttattaaaatactatagaaacagatcggatgtcagcaacccgaatatcaatctgatcaacccttctattactgctttcgatcagaatatagctgatcaggcattggaacacagattctatgtacgtaactttaaggaaaaagaagaaaacggcaaagaagtctattatttatttgataaagataaaaagatagactggacttatactcctgctgaaattacagaccaggaatttaagtctcagacccaccgtcatcaatggatgcttccacaggcaaaggcttaccgcgtcaatcagaatgagaaatatattcaatcatggatagaggtttatagtgactggctgaatacattcccttgtccggaaggtacggtaagcaaagatgctgtccagtggtatggcctgcaacctgccgaaagagtgcttgaccaaatcgatatcatacctcattttatccaatctaccaactttacccctcaatggctttcaacattccttgttgcttttgctaatgaagtagagtgcattcgcaacaattattatactgacggtagtaatatttatgttacccaggtacaagcaatcactacagcaggtattttaatgcccgaattcaagaatgcagaagcatggctgaatgaaggagcacaaaaaatcactgaacagattactgcacagttcttagaggacggagttcaaaatgaattggacccaagttatcatatcggagtagttgcaggattctataatatatataaaatcgcccaactcaataacaagttaagcttattcccttctacctatatagaacaattgagaaaagcagcccgctttgttatggatatcatctatccggactatacaattgataacttcaatgatacacgttctgcttcatatactaaaaatgtattattaagaaatctgagacagtattctgaaatgttcccggatgatgcagaaatgaaatggatgtcaacagaaggtaaacaaggaacaacacctgccggtttgacacagatatatgatgcttccgggtattatatgttacgtagcggatggggaaaaagctcgaccatgatgattctgaaaaacaataataatccggataacaaatggcactgccaacccgataacggaacattcggtatctatcgtaacggacgtaatttcttcccggatgccggtgtatattcttatggaggaacaagtgcaagtaatgaagatcgcaagacattccttgcaactaagaatcataacacaatgacagccttaagtgcaacaattgccaatgggtatatgaaaggcgagttccttaaacatgagaccaaaggaaacacacagattttggttactcagaatcaaattaaagccggtcttactcaccgtcgggctgtattctttgtagataaagagttctttgttcttgtagacgaaggatacggagatggtaataaagacaaaatcaatttgaatttccatctttgttcaagcgaagctaatgaaacggtatatgatgacttgtccgcttcatatcagtatggcgcacataccacatttgcaaataataacatactggttcgcacttttgccgagacaaaccaggattttggcaaatcaaatgttgcatctgatgtttccaataagttaggagaaaagaatgcgtcacgcaaaggttatcaatataccatacgaaaaccacaaaatggagctgcccgctttattactgtaatctatccgtttgaagctgtttctacacttaataatctgactatggatgcccagtttactgataacgcctctgaagacgcaggtacattccatacaaatggtgctgcggtagaagtaactatcaatggcaagaaatacgaattatcttatactttataatttaatatacctaagaaaaatgagatctaaattacaaaacattacttcaagattgctggcaatcttaatggtagttggattgtgtgtcacgaactcctcctgcacggatccggagacaactgactctaccaagtttgcgattttctatgccggtattaccgacataggcccctctatgaattttaacatgtccggaccgacttacatcggaggtaccccctctgatttttctatcactcgcattactcttgatggagaagtatacgatacagattgttttcaaatttcagatcctagtacaggagctattaaattagttaatacggataatctgcctgtcggtacttattgcatcagtgtatcttgtatatcaaatggaaattattacgagtttaaagatgcaatcactgtaaatatgctggcaccggttcctgacggaattacagtagacccaagcgaagttacagtagattttgcagacatctataaagagtctgccagtgctcaggtaaaaactgaagaaggaacacatgtacacatcagcaagtatgaaatcattcaggaagaaggaaaggaatactttgcaatttccaataccggaaaaatcacagtcaacgataaatatgaaggagaaattcttcccggtaaatatgtgttgaatcttaaattaacaacagaagcaggagcaggtatatacgaaaatgctgttacattcaacattatttccagtccgcttacgttaacatataaacccgcatcggtgagagtagaaaaagatcaagcatatgtgtccggagctccaattctcaaaggatctccagaaggactgacgtataagataaaatcaatctctcccgagacttcaactatctctatagatgaacagaccggaatcataacccttgccgccaataacggattagaaatagataatagctataatgtatctgttacagcaaccaaccaatatggcagcaaggatttcgataatacatttgttatcaatatagtggcattcattaaccctattacccaacttcgatatgcaaaccaggaaaagatacaatctgttgcatttgaatttggtccggaagaagtagatggagacgaacttacttactcattcattgacttggactccagattagccgataaacttaatattgatggagttactggtgttatttctgcaaaaaaaggcaattcaatagaaactggcacatatacaatcacagtacaggcgaaaaatgacaagagtgagaagacttcaacctttacactgactattgcagcaaatcctaactatttcacttacatacgttatggaaataacctgggacttacccctgaagaaaactatgctgatcaattcgattatgacaaaaaagctattcttctagctgaaaagttaactcctaagacagacattcccaatggtcgtcctgttaaatgggaagttaaaatattaaatacaactgcattaagtggtactacaatctcagaaacaggagaactatcatttagtgagaataaatggaatagcaattatggtgttagtgtactttttgttaccgcaacggtgggttctggagaagaagctatatctaaaacaattcctgttttcatacgtcaaaataaagataaaaacggaattttcgtcaaatatactccatttgcagtaaagatgaatccttctaaaggtggtatggtagctgcacctgtagttacatcaaatggcacaactgtaacagattacacaacatatttaatggattatcgtagagacttctattactatagtttcattgaaaaccatgtagatggaatacagtcagtcaatggtagttttatgaatggcttgtgggcaacatattataaagcaattgggaaaactcctaattatagtgcaagagctcctatgtcctactacgataatgcccaaaatctcagtcaacccttaggctatataagcaacaaagatctatctgtaacaatcaaccctggcaaatggaaagattctgaaggagtgtatgcaaatggtgtttttataggaagaatgtcttttgtaactgacggtaaacaggcagatctcgctaatgatggcactaccaaaaatcaaatattcccattagccatttggtttgatgaaagtttctaatttaaatctaatatagaatagatatgtacaatataaaatttaaagcattgagtaaaagagggtattttaccctcttagctctcttaattgcgattacctcatttgctcaggaaatcacaataaacggtgtcgttatcgatgaaacggatactccattaatcggagcaacggttcaagtaaaaaacactcaaaaaggagtagttacagactttgacggaaaattctccattaaagcgaatagtaatgcaacattgattatcagctacattggctataagaatcaagagatcaaaataaaaggtcaaaagaacttgaatatcaaattagaaccagataatgcaatgctggacgaagtaattgtagttggttacggcagtatgaagaaaagcgacttgacaggctccgtttcttctgtagcagctaaatctattgaaggtttcaaaacaggttctgtagtagaagcacttggaggtcagattgccggtgtacagatcacccagtcggatggtactcccggttcgggtttcgatatcaaaattcgtggtgttggtacagtaaacggagattcttctccactctatattgttgacggattcgaagttagtagtatcgactatcttcctaactcagacattgaatcagtcgaagtattaaaagatgcttcagcttctgcaatttatggtgcacgcgctgctaatggtgtagttttggttacaacaaaatccggtaaagaaggaaaagccgttatcacttataacgggtcggctacttatcgtaacattcctaaaaaactggacatgctcagcacatatgagtttgccgcattacaagtagaactcaacccgactaaatacggaacgacttattatcaagaaggaaatgattctgacggagttccttatcgtcatcaaactttggaagactacctgacggatcccggaattgactggcagagtgaatcattcaaaccgacttggtctcagaaccatgatttcagtatcagcggcggtacaaaagaaactaaatatgccgcctctttctcacattttgatgaaaatggtatcttcacgaacagtggctataaaaagaatgcaggtaaattacgtatcaaccaaaagattactaaattcatcacttttgatgctactatcaactatgcaaatacggtgaaagaaggtatcggtacttcaggtaccggaggaacgctaaatatgttatcaaatatattacgtttccgtcctaccggaggtaacagtgtaacaaacgatgaacttctgaattctgttttcgacccattggaactaagtgagaacaccacttattcacaaattaatccaattaaacaggctgaagctgtaaaagaccggagacaatctgaattatggggagctaatgctgcactgacagtacaattgatgaaaaacctgacattcaaagcatcagccacttacaatacgactaataccagaagggatcttttctatggtgaaaactccagccaggcatatcgtagtggaggcgtttatggttctacacaaatgcagaaagacttacgttggcagagcagtaacacattaacttataaaaagaaaatcaataagaaaaacacgtttgatatcatgttaggacatgagttttcattcagaagctcggaacttttatatggacaatccaaagatttcccgttcccaaacctgggtaacgacaatctgggaataggagccactcctagcagcgtatcaacttcaagaagcgacaagaaactgttatcttactttgcaagaggtaactacaacttcgacaaccgttatctatttactgctacaatacgtgctgacggttctaccgtattctctgcaaaaaataaatggggatattttccttcattctccgcagcatggcgtgtatcggaagaaaaattcatgaagaacataactccgatatcaaacttaaaactccgccttggatggggtacagtaggaaatgaccgtatcacaaactatctgtctatggatctgtattcatcaagcaaatatggaataggacaacaaatggccacagtgctgagtccgaaacaactggctaacaaagatctgaaatgggaaggatctaccactgctaacttaggtattgatgttggtcttcttgataaccgcctgaacctgacagcagatttcttcttaaagaacaccaaagatctgttacttgaacaaaagcttgcttatgtaacaggattcaactctcaatggcagaatattggtaagattgagaataaaggtatcgaattgaacatcaattccactaatattcaaactcgtaacttcttatggcagacagatttcaacatttcattcattaagaatacattgaaagcgttgcaggacggcaatacatatatacagtcagcaactaaattcaacagtaacttcaatggaaatgattatatctccattgtaggttcttcacttggacaaatgtatggatatgtttttgacggtgtttaccaaacatctgatttcaacgtacttcctaacggttcaatgcaactgaaacccggagtggcagatataagcaaacatgccggtaagaccgtggaaccgggtatggtgaagtataaagatatagatggagacggtgtcattactcctgacgaccgtaccactattggaaacgggcaaccggattggtacggaggtatcaccaacaccttcaattacaaaaacattgatttcagcttcatgttccagttccaatatggcaacgatgtttataatgcgacgcgtatgttcaatacacaatcgcaagacgaacgaagtaatcaactggcagaagttgccgaccggtggactccgacacatgcatctaatcgtgtgccttccgccagaggatatgtaaaatatgaattatactcacgtttcgttgaagacggttcgttccttcgcttaaaaaacataacattaggatatacattccctaataaatggacaagaaaagcatatatcaaccgcctgcgtgtatatggtacagctcagaacttattctgcctgactaaatatagcggttacgatcctgaagtgaatatgaaaagcagtccgcttatgccaggattcgactggggtgcttatccgaaaagtagagtatttacatttggtgtagaagttcaattctaaacaaaaaaaagacaatgaaaaagttcaaatactacttatgcacattagcctgtgcaatcaccgtttcatcttgctcattagatgagaccagctatacagaaattgagaaaggaaactacatgaagaatgcggcagaagcagaaaatgtacttctgggcgtatatcgtgatatggttcaggatggtatttatggtttccacctatctttgtactttactatccccagtgatattgccaaagtaacaggtaacagtaccgacggacttcgtctgattccctcaaacgcttataccagttcacagacagaaatagcaacaacatgggcaaacctatacagtgctatctatgatgcaaacgattttatcgagacactgggacaaaaaatcggaacctacgatgaaggtaattacaagaaagccgctgtctatatggcagaagcacgttgtctgcgtgccatgtactatttcgaattagtacgttggtttgggaatgtagcattgataaccaatactgctcaatcccgtcaacatccatctactttcacacaagcagatcccgcagacgtatataaatttatagaaactgatttgcaatacgctattgataatctgccttattcagtggatgacaatatacgttctgacaacagtttccgtctttctaaaggcgccgcactcggactgttgactaaagtatacgctacttgggcaggctatcctgtccatgatacaagcaaatgggaaaatgcagcaaaaactgctaagattctagtcgaatcgggtaaacatcacttgctttctgacttcgaacaattatggaagaacacttgtaatggtgtttgggatgacgaagaaagtctgatcgaagtaagtttctatgctcctaccgttaccggagtatcagctaatgacccttgcggacgtattggtaaatggaacggtgtacaggcaagcggtatcagaagcgtccgtaatgccggtaactggcgtgtcatcccgactttcctgcgcgactggaaagaccgtgaaagtgataacagatggaagtactcctttgctgattacaaatatggtaaaaacacgactaccggtgaagatggagtcaaacttgtaatcaatgccagcggtaatattgaagatgccatcaaagacgatgctaaagatgcattaaagaaatcctatatcgataatgtatgcccgagaaaatgggatacagaagaatatgtaaacagtgccaactatcttatcgatgctaatctttccaatatcaactggtatatattacgttatgctgatgtattacttttatatgcagaagctttgaacgaatggaagcaaggaccgaccgacgaagcatataaggctatcaatatggtacgcagacgcggcttcggacttcctgtggaaaccgacaacagcgcctcagacttatccggattgtcttacgacgaattccaaaaagccgtacgtaatgaaagagcttatgaattggcattcgaaggacatcgcagacaagatttagttcgctggggaatctactacgacagcatcagaaaaacagctcaggatttagttgactggtatagtgccggtgacgaattctatgtatgcgtcgattatactaaaaagaataagaatgagttactccccataccacaacaggaaatggacttgtgtactcaattcaatcagaatccgggatggtaaataatcatactgtaatataacatgaaagcgttaccgaagaaatagtctttcttttggtaacgcttttatcataattctttatttcactgatttctatataccatgaaaaagaatcttagcatagtaattcttcttatatctttagccatcagtcaatcggtattctcccaaacctattcatttgagaagggaaaagtgcccgaaggttggaaaatagataaaggcgtgctccatatttcctctgagaaatacaaatcaggcagtcgatcacttcaaatcaaatggaaacagaacgcagttctcactatcccctcacctaccggtatttctgaagcatgtagaaacagaaatggtggtatgaacgcatggatctataacgaatctcccaccaaagagaatttactgttttccttcagagatgagactggtaaagaagtatgccaacttcccttcttacttgactttaaaggttggcgatgtatttgggctaaatttcaaggagacatgaatatgtcatccaaaagtaatattcagtcagtcgaaatacaattcccacagcatacaaaaaaaggagttacttacatagatcttttagagttcacgtctaaagtttcctggcagaatatgtcggatgcacaatataaggtgaaccgtactgactatagtttaatacctgacttcattggctatagaaatgctactccaaaagtagaaaaagtaatcacagccgaagataatcagattacaaccatcacagacagattaacaacctggtatcttggcagcgggcaacattcatctgagagatggataaaaatgagaacggaaaatgaaaagacatttattcggaatggtgtgaaagctgcccaaaaaatcaaaatccaatataccgaagatcatactcctcaaggagaaccattattcccgatgggagcacccactatcatagacggacaagaagctaaaaagttcaggagcattaatgaaaacatcctgcttccattggcactggattatcgtaaaaatcaaaatgatcaaagcctgaaaaaagcactttacatttatgattggttcaacgaccaaggctgggcagacggcagcagtatgggaactttatgttttgagaaacttagaagttccggctattttcactcattctttttgctcaaagaacaattatctccggaacaactaaaacgtgaactccaaacgatgaactggtttaccatgttcggggcatgctatcagcttccttcacatgccggcgaagtagcagataacttacgcgcattggcgattccaaagctaatatacgcgctatcacaaaatgataaacaagaaagggaagttgccctgactgcattcaagcattatatggacaatgcattaggaatagctccgggatttttcgggacgttcaaagctgacttctccggatatcatcacagaggtccttatcatagtgcgtattaccctcatgcactttatgcaggtgcactcattgcttatttactgcacgatactccttatgcactgtccgaaacaacattgcataatctgaaacaagggttattgaccttccgtttcttttgcgccggtctggaggtacctgccggaactgtgggacgtttcccaaaaggacaacagattttagagaccttattaccggcttttgcctatacagctctgtcatttaaagaaccggataaagaattaacagctgccttcaagcgaatacttgaatccacagaaaaccaacaggctatcactgaatatatcagtaacgtgaattcaaacttagcatataccagcaccgtaggagaaatcgagctagtaattcaattggcatcaagttccattgctaaagaaaagcctgtcaccggtacactgttcatgccttattccggattattggttgctaaagacagtctttttcatttcaacatcaagggattcagccgctatatatgggactttgaatcttctgccacagaaaacaccaaaggacgctatctgggctatggtcaaatagaatattttgactttaaaaacagacataaatctttcaatccgcaagaaacagacttcgactggaattatattccgggagctactaccaaagtattacctgataaagtattgcaagataaaggcggatcaagttccggacatcgtaatttctcagatgagacattcttaacgggggtacatgcttccgacaaaaatgcgatgttctctttcagaatgcacgatatcacttacgatcagtcattccgtgccaacaaatcagtctttgtatttgaggatttcctgctctgcctgggttcggacatccaaactaaagataaaagataccctacagtcactactttgtttcagtcgttcagcagaaacaccagtgaagaaagaatgccggaaggatatattctgacagacccttcactcatgtacgcagtaaaaggaggagcggtacgaacttccagtgaaggctctcacacacgagcttatatagaacacgggaccgcaccggaggcggcaaaatatcactattatatacttaaaaacaagaaaaaagtattggcccgtcaactattatccaacgagagtccgataaaagtaatagcacaggataacgatgcgcacattgttacctataaaacgaaagaaattacatgcggcgctcttttcaatgcacagaagaagtatgaaggtcaactggtatcccaagtaaatattccgctttcttatatactggaaaagcagaaggacaattcatttaaactctctgtttgtgaaccggatatgagaagaatatcccgtgcacatatgggactactgacggaagaagatgtaatacaacaagagaagccttatgatacgcaactgaccatcaatgggctatataatgtggaatgtccccaaaaaacaataaaagtatcattggataaagaaaaggacaaaacatatataaccatttctactatccggggagaaaactatacgcttttattacaccaagctgatcattaattatgaaaactcgattaatagcattatttattattactctttgcataacaggtactaacgcccagggcaatctgacactttggtataagtctcctgcaaaagcatgggaagaagcattgcctgtaggtaacggacgtatgggagccatgatttttggaaatccacagaaagagagaatacaattcaatgagaacactctttatagcggagagccggaaactcctaaaaacataaatatagtacctgatctcgctcatatacgccagttactcaacgaaggaaaaaacgcagaagcaggaactatcatgcaagagaaatggattggcagactcaatgaagcctatcaacctttcggagatttatatatcgactttgcttccaaagaaaccgtgacagactatatccattcgctggatatggaaaacgcagttgttacaacttcttataaacaaaatggcgtaaagataagcagagaagtctttgcatcttatccggcacaagctattgttatacatttaaaggcttcaaaaccggttttaagttttaccgcttatctgaattctccacatcctgtaacgaatgagtccgattcacaagttgtttacctgaaagggcaggcacctgcacacgctcaacgaagagacacagaacacatgaagcgtttcaatactcaacatttacatccggaatattttaatgccgcaggacatatcatacagaaaaagcacgtgatttatggaaacgaaatggatggaaagggaacgtttttcgaagcatgtctccttccaagtcataaaggtggaacactatccatttcaaaccatcaggtcactgcccgaaattgcagtgaagtgaccctcatgctatatgctgctaccagttataacggaccgcgtaaaagtccgagcaaagaaggtaagaatccgcatcaagaaattatgagttttcggaaaatcagtgaaggagaaaactaccaagaattaaaaaagaaacatatcattgactatcaatccttatttaaccgggtatcttttattcttccggcgaaaaaactacaaaaagaattgccgacagacgaacggttaaagaaattcaaggaagaagaagatcaggcattaatcgcacagttatttcagttcggacgttatttaatgatagccggttcccgaggcgaaggacaacccttgaatctgcaaggcttatggaatgatcaggtattacctccatggaattcaggatacaccttaaatataaacctagaaatgaactattggccagcagaagtcaccaacttatcagaatgtcaccagcctttattcaaactcattgaagaaatagcagataaaggtaaagaactggctcgtgatatgtatggattaaatggttgggctattcatcataacatatctatatggcgggaagcatacccatcagacggatttgtttattggtttttctggaatatgtccggcccatggttatgtaatcatatatgggaacactacttatttacgaaagacgtggattttctaaagaaatactatccgatactaaaaggatcagcaacattctgctccgaatggctaatcgaaaacagtaaaggagaactggtaactccagtcagtacttctcctgagaatgcatatcttatgcctgacgacactccggcatctgtctgcgaaggtagtacgatggacattgccattatccgatccttgttttccaatacaattgaagcttcaaagatacttcagactgatagggattttcgttcggagttaatcaaaaagagaagtaaattgaaaggataccaaatcggtagtaaaggacagctattggaatgggacaaagaatataaagaaagcgaaccgcaacatcgccatgtatctcatcttttcggggtgtatccgggatgtgacattacagacaacactccagaactattcaaggcagcacggaaatctttgaatgaccgtggaaataaaacaacaggatggagcatggcatggaaaatctctctttgggcacgtttgtacgattcatcaaatgcttatgaagcgttgagtaatttggtcaattatatcgatccccatgtcaaagctgataatcgcgggggattatatcgaaatttactgaatgcacttcctttccaaatcgatggcaatttcggagctactgccggcattgcggaaatgttattgcagagtcataatggaaatattcatttgctcccggccctcccccctacctggaaagaaggaagcataaaaggactaaaagcacgaggcggatttactatagacatggagtggaaagaaggaaaaatgacagtcgcaaacattaccagtccatacgaacagaccatcgaaattgtttataataaccaaataaaaaagactcatttcaatgcaggagaaagaaaaaagatttcattttaaacgaacgggaatagggctctagcccccttgtaaagggcatgcttgacaaaattaatagttttttcaacaaaactaatagtcgaaattctgtttcaatgtccttttcaacattcgtatcatttaaaattaaacagatcatctacttttgcatcagttacaaaacttctaaaaacaatcacttaaaatgaataacatgaaaaagaaacttgttctctttgcttcggttgccattgcacttgcatcgtgccagacaactccaaaggaagactacagttggattaagaaagggctggatgtagcttctgcccagttacaacttacagcagaagaaattgacggaaccggtaagcttccacgttcaatccgcaccggatatgacatggatttcctctgccgccaattagaaagagatccttccacttttcaggattcacttcgtccgcaacctactgccgaacaaatgggcaaacgtcgtttatgtgtagtatacgactggacaagcggtttcttccccggatcactgtggtacgcatacgaactgaccggaaatgatacactgaaagcggatgccattcaatatacaaacctgctgaatccggtacgctattataaaggtacacatgatttgggatttatgatcaactgcagctacggaaacgctgagcgtctggctcctaacgataccatcaaagctgtcatgaaagaaactgccgataacctgagcggacgtttcaacgattcaatcggagccatccgttcatgggactttggcagctggaacttcccggtaatcatcgataacatgatgaatctggaccttctgttcactgtaagcaaatggacaggcgacaacaaatacaaggatgtcgctatcaagcatgccatcactacgatgaaaaatcatttccgtcctgactatacttgctggcatgtagtaagctataacaacgacggcacagtagaacgcaaacagactcaccagggtaaaaacgacgattcttcatggtcgcgcggacaggcttgggctgtatacggatacacttcctgctaccgcgaaacaaatgacactaccttcctgaactttgccgtaaacatagccgacatgatcatggagcgcgtgaaaacagacgatgcaattccttactgggactacgatgctcctgtcaccgaagagactccacgcgatgcttcggctgctgctgtaacagccgcaggattcattgaacttagcacaatggtacccgacggaaagaaatatctggattatgcagaaaaaattctgaaaagcctttcaagcgacgcataccttgccaaagtcggcgaaaaccagggattcatcttaatgcactctgtcggatcattgcctaacggttctgaaatcgatactccgctgaattatgctgactactactatttggaagcattgaagagattcatggacttgaagaagttgagattggagaatggagaggtgaaagttattgagtaacatagctgagaaaattcaaatctaaattgtaatttgcagaataataaatgatatcatgaataaaactctgaaatatatcgtcctgctgacatttgcttgtttcgtaggcaaaggttatgcccaagagttgaaaagcgaggtattctcgcttctcaacctggactaccccggattggagaaagtaaaagccttacatcaggaaggcaaagatgaggatgccgcaaaagcactgctcgactactaccgtgcacgtacgaatgtgaagactccggatattaatctgaaaaagatcactatcggcaaagaagaacagcaatgggcggacgacggattgaaacatacattctttgttcacaaaggttaccagccttcttacaactacggagaagatatcaactggcaatactggccggtgaaagacaatgaactccgctggcagttgcaccgtcataaatggtttactccgatgggtaaagcataccgtgtatcgggtgacgagaaatatgccaaagaatgggcataccaatacatcgactggatcaaaaagaatccgttggtgaagatggacaagaaagaatatgaactggtaagtgacggtaagattaaaggcgaagtggaaaatgtacgtttcgcatggcgtccgctggaagtaagtaatcgtctgcaggatcagactacacagttccagttgttcctcccctctccttctttcactccggatttcctgactgaatttctggtgaactatcataaacatgccgtacatattctggctaattactctgatcagggtaatcacttgttgttcgaagctcagcgtatgatttatgcaggtgcattcttcccggaatttaaagaagctccggcctggagaaaaagtggtattgacattctgaaccgtgaaataaacgtacaggtttacaacgatggcggtcagtttgaacttgacccgcattaccaccttgctgctatcaatatcttctgcaaggcactgggtattgcagatgttaacggattccgtaatgaatttccacaggaatatctggataccatcgaaaagatgatcatgttctatgctaatatttctttcccggattacacaaatccatgtttcagtgatgctaaaatcacggaaaaaaaagaaatgctgaagaactatcgtgaatggagcaaactgttcccaaaaaacgaaactatcaagtatttggcaacagacggcaaagagggtgcattacctgattatatgtcgaaaggtttcctgaagtcaggtttctttgtattccgcaattcctggggaatggatgctacacaaatggtagtaaaagccggtccgaaaggtttctggcattgtcagccggataacggtactttcgaaatgtggtttaacggcaagaacctgttccccgactccggttcgtatgtatatgcaggtgaaggcgaagtgatggaacaacgcaactggcaccgtcagacttccgtacacaacaccgtgactctggacaataaaaatctggaaacaaccgaatctgttactaaactgtggcagccggaaggcaatatccagacattggttacagaaaacccaagctacaagaacttcaagcaccgccgttcggtcttcttcgtagacaatacctactttgtcattgtagatgaagtatcaggcagcgccaaaggttctgtcaacctgcactatcagatgccgaaaggtgagatagccaacagccgcgaagacatgacattcctgactcaattcgaggatggaagcaacatgaaacttcaatgcttcggccctgaaggcatgagcatgaaaaaagagccgggatggtgttctactgcatatcgcaagcgctacaaacgtatgaatgtttcattcaacgtaaagaaagacaatgagaatgcggtacgttacatcacagttatttacccagtcaagaagagcgcagatgcccctaaatttgacgctaagttcaagaacaaaacgttcgatgaaaacggactggaaatagaagtgaaagtaaacggcaagaaacagtcattaaaatataaattataatccagtgaccagcgaggcactgagaccagatttccatgcggatatatgcccgctacggaaaaggcctcggctcctcactggtcattttttatcatcagatgttatttctatcatgaaaagcaatccctctaccttactgcttccattggctgcactaagcctcgcttcctgtgccaaccagaaaaaagaagaaaccaaacgtccgaacatcatcttcatgatgaccgacgaccataccacccaagctatgtcctgctatggtggcaacctcatccagactcccaatatggatcgtatagccaatgagggtatccgttttgacaattgttatgcagtcaatgccctttccggtccttcacgtgcctgcatcctcaccggaaaattcagccatgagaacggctttaccgataatgcaagcaccttcaacggtgatcagcagacattcccgaaactacttcaacaagccggttatcagactgccatgatcggtaaatggcatcttatcagcgaaccgcagggatttgaccactggagcatactcagcggccagcatgagcagggcgactactacgaccctgacttctgggaagacggaaagcacatcgtagaaaaaggatatgcaacggatattatcaccgacaaggcaatcgatttcctcgaaaaccgcgacaaaaacaaacctttctgcatgatgtatcatcagaaagctccccaccgtaactggatgcccgccccccgccatctgggtatattcaacaatactattttccccgaacccgcaaacctgttcgatgactacgaaggacgcgggaaagcggcacgggaacaagatatgtcgatcgagcatacgctgacgaatgactgggacttaaaactgctcactcgcgaagaaatgctgaaagatacgacaaaccgcctgtatagcgtttataagcgcatgcctgtagaagtacaggacaaatgggattccgcctatgcacagcgcattgccgaataccgcaaaggcgacctgaaaggcaaggcattaatcagctggaaataccagcaatatatgcgcgattatctggctaccgttctggctgtagacgagaatatcggtcgtctgctgaattatctcgaaaagatcggcgaactggacaataccattattgtctatacttccgaccaaggattctttctgggtgaacacggctggtttgacaaacgattcatgtacgaagaatgtcagcgtatgccgcttatcatccgttatccgaaggccattaaagctggaagcaccagcaacgccattagcatgaacgtagacttcgcccccactttccttgactttgccggtgtagaagtgccatctgatattcagggagcatcactgaaaccagtattggaaaacgaaggcaagactcctgccgactggcgtaaagcagcctactatcattattatgaatatccggcagaacactccgtaaaacgtcattacggcattcgcacgcaggacttcaaactgattcatttctacaacgacattgacgaatgggaaatgtatgacatgaaagccgatccgagagaaatgaacaatatcttcggaaaagcggaatatgctaagaaacaaaaagagttgatgcaactacttgaagaaactcagaaacaatataaagacaatgatcccgatgaaaaagagacagtgcttttcaaaggagacagaagactgatggaaaatcgataaataacccaaaacaatcatatcatggacagaagaaattttataaagaatactggctggtcttttttaggactggcagcatccggcagcctgctcggctcttgtgcggcaggaagtaaagaagccaaaaagaaaatgccatcggcaagtgacctcaaaatgtactggggagacctgcacaaccattgtaacatcacatacggacacggcgatatgcgcgatgcttttgaagcagcgaaaggacagttggattttgtaagtgtaacaccccacgccatgtggccggatatccccggagcagacgatccacgcctgaaatgggtaatcgactaccataccggtgctttcaaacgtttgcgcgaaggcggatatgagaagtacgtagccatgacaaacgaatataataaagaaggagaattcctcactttcgttggatatgaagcacacagcatggaacatggcgaccatgttgccttgaactacgatctcgatgcaccgcttgtagaatgcacttccatcgaagactggaaacaaaaggccaaaggacacaaagtattcatcactccgcaccatatgggctatcagggtggttatcgcggctataactggaaatgctttaccgaaggagaccagaccccgttcgtagaaatgtattcccgtcacggtctggctgaaagcgatcagggcgactatccatacttgcacgatatgggcccccgccaatgggaaggaaccattcaatatggtctggaactgggtaataaattcggtattatggcttctaccgaccaacattcgggttatccgggcagttatggcgacggccgtatcggtgtactggctccgtcattgacccgcgacgctatatgggaagcacttcgcacccgccacgtatgcgccgcaaccggcgataagattttgattgacttccgcctcaacgacgctttcatgggtgacgtagtgcgtggcaacagccgtcgcatttatctgaacgttaccggggaaagttgcatcgactatgtggatatcgtcaagaacggtcagattctggcccgcatgaatggtccgttgactccggttgcccccgaaggtgatactgtccgctgcaaagtgaaagtagatttcggatggaaccgtgaagagcagtatgtacactggcaaggtaaattgtctgtagacaaaggacgcattctgagcgtcactccatgtttccgcggtgcggccttcacttctccgcaagaaggggaaacagaattccatactcacgtaaaccgcattgtatccgcagacgaaaaagaaaccgaactggatatgtacagcagcaagaatccgaatacgactaccgctgccatgcaagctgtcatcctcgaagtagagatgccgaaagacggaaaagtgattgctgatttcaacggcaagaagtttgaacacacattgggcgaattgctcgaaggctcacgttcgcacttcatgatcggctggctgagcgaagcgattctcttcaatcgtgctatgcccgaaagctgtttcactgtggaacactatatggaagataaagagcctcagcgtgatacagattactactacgtgcgtgttcgccagcgtgacgggcaatgggcatggagttcacctatctgggcagaaagagtataaactggtatatgaaagaaaacagttgctttgcttgtgccaagccgttggcacagttgtgtcaagctgttggcactgctatgccaagcctttggcacaagcgtgccaatacggtggcacaagcatggcacagtataaacgaatttaaaacatacctagttatatggaaaaagaatacgctataggaattgatcttggcgggacttctgtgaaatacgctcttattgataataatggcgtatttcactttcaagggaagctaccgtcgaatgccgacgtatcagccgaagctgtcatcgggcaattagtcaaggcagtcaatgaagtgaaaacctttgccgaagcaaaggaatatacgatagccggtatcgggatagggacaccgggaattgtcgattgtacgaatcgtatcgtattgggaggtgcggagaatattcaaggctgggaaaatctgaaactggcagaccggatggaaaaagagaccggacttcctacccaactgggaaatgacgctaatctgatgggactcggcgaaacgatgtacggagccggaaacggagccactcatgtggtctttctgactgtaggaaccggtatcggtggcgcagtcataattgacggcaaactgtttaacggatacgccaatagaggtactgaattgggacatgtccccttgatagctaatggtgaaccttgcgcctgcggttcaataggatgccttgaacattatgcttccactgccgcactggtccgtcgtttcagcaaacggatagccgaagccggcatctcttatccgaatgaagaaataaacggagaattgatcgtccgtctctataaacaaggagataagattgcggctgagtcgctgaacgaacattgtgatttcctcggtcacggcattgccggatttattaatatcttcagccctcaaagagtcgttatcggcggaggactgtccgaagccggagacttttatattcagaaagtaagtgagaaagcccttcgctatgccatccccgactgtgccgtgaacacggaaatcatggcggcctctttaggcaacaaagccggaagtatcggtgccgcctccctctttttaaatagaaaaccgaattaaatgaagagcagaaaaccttctcaacttatttaagattatgaagaaaaatctaggaatgctggcgctgattatggcgttctggttcactatctcgtttattaccaatattctgggaccgcttattccggacattatccacaatttcaatctgagcgatcttgcgatggcggggtttatcccgacttccttctttctggcttacgccattatgtccatccctgccggactactgatcgaccgtttcggtgaaaagcctgtcttgttctgtggattcctgatgccgtttatcggaaccatcctgttcgcctgtatgcatacttatccgatgttgctagcttcatctttcatcatcggtctgggaatggcaatgctgcaaaccgtgctgaatccgctccaacgtactgtaggaggagaagaaaactatgctttcatcgctgaactggcacaatttatgttcggtatcgcctccttcctaagcccgttggcatatacttatctgattcgggaacttgatcctgccacttatacagcaggaaaaagccttatccttgacttgctggcggatatgacgccacaagatatgccttgggtatctctctactgggtatttaccttattgttgctggtgatgctgattgccgtcggcgtttcgcatttcccgaagattgaactgaaagaagatgagaaaagcggatcgaaagattcctacctcgccctgttcaagcagaaatatgtatggttgttctttctgggaatcttctgctatgtcagtacggaacaaggaacctctatcttcatgagtaccttcctcgaacaatatcacggtgtaaacccgcaggcggaaggtgcgcaggcagtcagctacttctggggactgatgacggcaggctgtctggtcggaatgattcttctgaaactgattgacagcaaacgcctgctacaggtttcgggagtattgacgatagtgctgttactagccgctttattcggaagcaaggatgtttcgctaatcgcctttcctgctatcggattcagtatttccatgatgtactctatcgtcttctcattggcgctgaactcggcttcacagcatcacggctcatttgccggaattttatgttcggctatcgtgggtggagcaggcgggccgatgattgtgagtacattggcagatgctacgtccttgcgtacaggtatgctgtctatcctgctctttgtgggatatatcaccttcatcggtttctgggcacatccgctgatcaacaacaagacaatcagtctgaaagaactcttaaaaaaataagatgatgaaacaacgatattatattttcctgttatttgtagctatgctttcctatagtggatatgcgcagaaaagcatcctgcgtctgagtcagcagacgctgatgcatgaagtccgcgaaacaccttctccactagacggtcagcacatagcagtcaatccgccgcgtttcatgtggccggataagttcccccacctcggacctgtgcttgacggagtggaagaagaaaatcacaaaccggaagtgacataccgcatccgtatcgcacgtgatcctgagtttaaatcggaagtaatgaccgccgaaagaaactgggctttcttcaatcctttcaaactctttgaaaaagggaaatggtattggcagcacgcctaccttgataaggacggcaaagaagaatggtcgcccgtctatcatttctatgtggacgagcagacacgtacgttcaatcctccctccttgcaagaagtgctggcgaagttctctcaaagccatccccgtatcctgctcgatgccaaagactgggatcagatcatcgagcggaacaagaataatccggaagcgcagctctatattcagaaagcaaggaaatgcctcaatcatccattgaaacatctggaggaggaaatcgataccacccaagtagtcaaattgacaaacatcgtacaatatcgctcggcattgattcgggaaagccgcaagatagtagaccgcgaagaagcgaacatagaagctatggtacgcgcttatctgctgacgaaagacgaagtgtactacaaagaaggtatcaaacgtctttccgaaattctttcgtggaaagacagtaagtactttgcaggagatttcaaccgctccacgattctgtccatgagtacttccgcttatgatgcatggtacaatctgttaacgcctgccgagaaacagttgcttctcgaaacgatcagcgaaaacggccataagttttatcatgaatatgtgaatcatctggaaaaccgtattgccgacaatcatgtatggcagatgactttccgtattctgaatatggcagcttttgctacatacggtgaattgccgatggcttccacttgggtagattattgctataacgaatgggtatcccgtctgccgggactcaacaccgacggaggatggcacaacggtgactcttatttccatgtcaaccttcgtacattgatcgaagttcccgctttctattcacgtatcagcggtttcgatttctttgccgatccctggtataacaacaatgcgctctatgtaatctatcatcagcctccgttctccaaatctgcgggacacggtaactcccatgaaacgaaaatgaaaccgaacgggacacgggtcggctatgcggatgctttagcacgtgaatgcaataatccgtgggcagccgcctacgcacgtaccattctggagaaagaaccggatatcatgaaaaagtcttttcttggaaaagcaggtgatctgacctggtatcgctgcattactgacaaggcactcccgaaagaagaacactcattggcagagttgccgatgacgaaagtatttaatgaaacgggaattgctacgatgcatacttcgttgggggatatagaaaagaacgcaatgttatcattccgttccagtccatacggttcaacttcgcacgcattggccaatcagaatgcatttaataccttctatggcggcaaggcgatcttctatagcagcggacatcgtaccggttttaccgatgaccattgtatgtattcctatcgaaacacccgtgcacacaacagtattctgatcaatggaatgactcagactatcgggacggaaggttacggatggattccccgttggtatgaaggagaaaagatttcgtatatggtgggagacgcttccaatgcttacggaaagatcacagctcctatctggttgaaacgtggtgaactttccggcacgcagtacactcccgaaaagggatgggatgagaacaaactgaagatgttccgtcggcacatcattcaattaggcaatacgggagtgtatgtgatttatgatgaactggaaggaaaagaagcggtcacatggagctatctgctgcatacggtagaacttccgatggaaatgcaggaacttccttatgaagtgaaagttacgggaaagaataaggatggaggcatctctgttgctcatcttttcagttcggcaaagacggaacaggccatcgtagataccttcttctgcgctccaaccaactggaagaatgtaaccaatgcccagggaaaagctgtgaagtatcccaatcactggcatttttcgtctactaccattccatgtaaaactgcccgtttcctcaccgttatggatacacatggaaataaccgtgcggatatgaaagtggttcgccaaggcaataccgtacaagtaggcgactggattattacctgcaatctgacggagaaagggaaagcggcaatcagcgtcacacatcaagcggaaaaggtttctttgaaatacgatgccggcaagaaggaaggtgcgactatcatcacagatcaagtacaagggaaacaggtcaataaggttctgactgactatttaccagattttgagatataatttccccattctggcacacaatatggagctattcaatggttattataaacttacgaatagctcctttcttttattgtcttttattgaaggtgacaatgcttattatgccacatttcaagcattaataatgtccatgacaggtattaatatctgacttttcaggtattaacagttgacatctcagatattaacatctgacaactcaaccattaatacctgagatgtgggatataaaaagacagtagaccactgtacctttatcataatgagcattgagtttactactaaaaaattgtatctttgcctatgttggtactctacgcaaacattgaaacctgcataaatgttatatcaacagataaaatttaaatagaataaaagatgaaatacattggagcacatgtaagcgcatccggcggcgtagaattcgcccctgtcaatgcgcatgagattggagcaaatgcctttgccctgtttactaaaaatcaacgtcaatgggtgagtaaaccattgacagaagaaaacatccgtcttttcaaagaaaattgcactaagtacaatttccaaacagactatattttaccgcatgacagttaccttattaatttgggacaccccgaagaagaaggattggagaaaagtcgagctgcctttttagatgagatgcaacgctgcgaacaattaggactgaaacttctcaatttccatcccggcagccatctgaataaaatctccatagaggattgtctcgcactcattgcagaaagtatcaacctgactttggagaagactaaaggagtaacggccgttattgaaaatactgcggggcaaggcagtaatttaggaagtgaattctggcaattaagatatatcatcgaccgggtgaatgataaaagccgtgtaggtatttgcctggatacttgccatacatatacagcgggatatgacatagtgaatgattacgataaagtctttgacgaatttgaaaaagaagtaggtttcgagtatctgcgtggtatgcacctgaatgattctaaaaaagaattaggcagtcatgttgaccgtcacgataacataggccagggactgatcgggagtgcattctttgaaagattaatgaaagattcaagattcgataatatgccacttattcttgaaacacccgatgaaagcaagtgggcagaagaaattgcatggttgagaagcgttgaataaacgcttcacttcttttttaataaatattcgccatactgactaacggctcatagagtttctcgatatcctgcgagtccatttctatctgcacctgatcccccggcatcagtttctgccctttgggaggccagtttttccggtcacgatgaacatttataataatacaacgttccggcaggcgaagttcatccacgattttaccatccaggtaagaaccgctcatgacctctaccgataaagtgtagcgggcctcttctttaaacgcaggagaattaatcatatcatcatataaaatcacattgaaaggttttatctgaagcatttccgtgaaatagtaagtcagtcctcccactacaatagaaggataaaagacttccagatgtcccgtaatctcagtaatcagcacaatagcggtgagaggtgtacgtatgaccgcaaccagaaaagcagacatacagatcaacatgatataactgatattttcataagcaatcactccttgctgaaccagaatcaatgcaactatttgccctaaaagccctcctgtcactaatgtaggaatgaaacttcctcccggcagtcctgacgaaaaagaaaaggtactgaatacaaaatgcaacaacatcataccgacaatccaaagaatatgggtatcgggatgcatggcctgtgccaacagaaactgttccccacctcctgtcagattgacttctgccatagagatgagataagcaataaagagcagatatagcatttttacgtattccggatgcttgatggccggatagatacgtttgacctgaagcgtagtgacagaaaagaactttccgaaaacagaaaccacagccgccaaaagaagaaacaactttacctgtgaccagaaagtcattcccggtacaatcgcatcaatctgaaaatacggattgataggaaaaagccaactggcgactcctccggcaacgactcctgccagcaaggtagtaatcgccgtctttggcgcatcaaaccgttcaatagattctataaccagcaatgaggaagccaacggagcagcaaaagcagccgccaacccggcaccggcacccgccgccaacaattgtttccgctcgccggcaagcactctcccccatttagaaaccagacatcctacatacgaaccgatctgcaccgaaggtccttcacgtcccaaagacaaaccggtgcttagcgcaagtattcctcccacaaacttggcaatcacctcaatgaaaggatgtttatacgcaactcttccattgataactccacgtgtttgtggaatacctcctcctgtgatcaacggcatctttttcaccagccaggagacaaatataagaatcccccacattaacagaaaaagaggaaggtaccaataccatttaggatgagaatcaaagaagtcatgacgaagattgaagaagaactgaagcaggtaatgataaggcacagcaataagccccgtcagtaacccgacaaagatactgacaaagtaaagccgcgcatcaatcaatttgagtttgaagatacgccaacgtcctctgtcctttaattttttaatcagtcgaaactccattcagcaaagttttcattgttttcgcatggatacaacaattaataccccgcagaggtttcagactgataaatatttaatcagctttatccttccagcagattcagacgcagaataccatgtatcatgagtcagcatcaactacacgtccggcaaagctctctttgccggactgtgcataggctgccaaaacttatcagtaacaagacacaatgaataatcaacgatactgaaaagaatagatatatctgcctatgcccaatttgtgttgactttagtaaaataaaacactataataaataatacctaatccattatctacttttgagtttgatgaggggtatgctgtctttgtctctggcggtcttgtccgggtttgtgaccttgtcccggtttctgtccttttctacggtcaaactcttttctgaatttattcatattgctcttttcctgctgataaatcttcatgatctgcttttgagacagaatcttgctgaactcattataatacttctcacggatgtccagcatcttacgactctgcgcaaactgatctttcaacattttagcgatttccgcatctgtcataaccggttttggagtttctttggcagtattggcttccgtaccttgagctgcatcttttctcgctctgggtttgaagttcatcatacgacactcacgaagttctttcagatacttctcgtatatcggagtaaacttggctgccgttgcatcatccagcatgagcgctctcaccatctgattggtctgcatctgcatcatctgctccggtgtaggacgctgttttctttctttgttttcttcattctgtgcagaaagggtcatctggcttcccaaaaataaagccatcaacactacataaataaacttagtcttcataatctttacgttttaataattaattgagttattcagtttaaaaatatatcgttttcagagaagctgacgagctcttccaactcctcatctgacaattccttaatccatttatctaccggatctgtagttacattatttttatcgacagccaatatatttgaagcagatggtgtgtcggtattcatatagcggagagacggcgtaaacaaaatcccggccaatactgctgctacagcaatcatagtaggaataatccttttcagccgacgcttcttgcgttgctcgtcaaccgtacgttccaatatcttacgctgtgtctcctcaaaaaagttatcgggagtgcgataaggtgtccgcttaccaatattgtcaaaatcaaaatccttatccatgatgttacctgtttaatatatattcctttatcttatctttcgcatagtgataattcactttcagtgtctcaaccttactatccagaacacgggcgatatcttcatattccagttcatcgtaatagcgcaagttgaaaacgatccgctgcttttccggcaaagtcaatatagcttcctgaaactttacagccagttcatcttcgtagtcgacatagtcagaagctttcagtttactcatcagttcttcctgaacatcttccgctgatattacttcttctttacggctattcaataaccgaagacactcattcgttgcaattctgtagatccatgtactcagcgaactttcattccggaactgatccaaatggcggaatacacgaatgaagacttcttgcagcacatcttccgcatcttcgtgagacactaccattctccggatataattatatatcggttcctgaaaactgtccaccagcaacctgaatccccgctcgcgatctgaggaacaagcttttcggattttatcttcgtttatcatctattatttctgagctttggttattagaacgccgaaaaggaacgaagttaaatgcacaagagccgattttacatttattaatagaaaagaggaaatatgacattggcatacaaggaataaaaaaacgcctccataatctttttcaagaccatggaggcgctgttaactctttatatacaagccgaagttgactgaaaatcaccagaacttattatgttccgcactatattcaaaacctgcagctttcaactgactgacaatatcttctctgcttacatccatatcttcgcaaagctcatctagcgaagaataacagtcacgcaacttcatattgatgacactgaacagcaccatcggatctttaggcaattccatattctacaatcttttaaaccgggcgcaaagttacagcaatcccggcgaatggcaaaacaaatcaagggccgatttcttctattttcaaagagattctctcaatcagcttaccaagttcctcttccagaggtatcacattaaagtccctccagaagtcttcatcatatttgaaattcagatcagagaagatagtacgcgtcggtaatctctctgcccgtgggaatgcagtcacttgttccgtatccactttgcaagtgatcatttcaaaccagatctgcatctgcggactagcagacagcaaccgtcgccgtttcaccttgaaagaaaggtctccacggatatgatgaatataatagataccttgccatggtttgtaggaaatagtataaaccaccttttgcggtattatctgaatgccatgcgtgcgcctttctacaaacatttccgacgctttctttacacgctggggatctacctcaaaacgagcttgtaacaaggcattcgtctcggcatcaatatacaaatctccgcaatagagaggctcgataatctccttcttttgtgcaaagtgtatgacattcacacaccggtcgtctatgaatgtcactccctgcgaagtatacagataaccgttatcacctgcgtcaggtatcaggaatgaaggcatatccttcattatatccatctgaaaacatgcctgaatgccggacttcacctttacaagcagactgtctttggcttcgacattactcagccgactcatcttcaacagcttcgcctgatcggaaacgggagaatgcgaagcgatcttataaactttgaaaactgcttcagtaagattctgaaccttatttttcaataaaactccttcacggtaaaatgtggtcaggtaggcaggagaatgagaatagttctgctctctttgccttcccatttctttcagcagcttataaggatcgacccattgaaccactacttcctgtaaaggaacaacctttggttccaagctcagaatatgatggcgacctgccaaaactgaaacttccagagtttgtgaaacatatcctatatgagaaaaaacaaccgaatcgttttgcaaagaatccggtaaggaaagtctgaactctccttcctgattagtaataatccccacagatgtcctccggactccaacggatgcagaagcaacaggcattccggtttccttatccagtaaagttccggtaagcatcagatttacagggtgaacggatgaaggtttcgcctgttgctgtttggtcggtgaagaagaagttatcagaatatgagtccctattactttaaattccaggctggtatctcctgttatctcataaatagcctgacgaatggttcgctctcctttccgtatcttcaccgttacatcattatctactactttactgtcatagataaacagataacctgactgctgagaaatattgcctaacagtgaatagaccgttcctttcatcttcggcagactgatcatacgctccagcacatcttctccgtcagctctcaacgtatccggtacgataaagaacaaacacagaatcaccatatagcgataaaccatcctcatctcacttttttttatttattctgtcagtatgaatgtatccccctgccgtgtacacttcaaattaagcgcataggctatcaatgtagccacagtctctggagattcattggaaaattcaactgtcagctttcttttttcaagcgcaggagaagctacacgtatctgcgaactgcctgcattcatattcattactttcagaatatgccccaaagattcatctttaaaacagacatgcttcagatagcgattcaactctccggcattttcagtcgaactgagcaaaagttgctgtgattgcaataccactgtctcaccagctttgacataacattctttatttctctttttaagggttaccctaacggttccccgttgcaccgaaagacggaacggagcatcttcgacgctctttacactaaaagcagtacccaatacttcaatctttacttcctttgtatcaatccaaaaaggttgcttctgtttctttgccacatcaaaaaaggcatctccctgcaaactgacttcccgtttatcagaaacaaaatgttccggatatcggatagaagtctcctttgccaagaacacgacagaaccatcttccagagtcgtgaccaatgtaggaacatcttgattctcctgtgttataaagtcaggtaattcctctttttgaccgaatccccaatacaaagtactaaaaaccaaaccgaccaccatcgccgctacagtgccatagcgtacccacatcgggattttaggcatccgatggtcttctacaagcagatgatctttatccaatcggtcgtacaaccgattccaagcctgctccgtctttattttatgaatatccgttttcatcatttcatttgaatataattttctatttcttttcgcaaagttcgtaaagtcttcgtcatttccgcttccaccgttttgacggagagagaaagctggactgcaatttccgcatatttctttccctccgtccggtgcattttaaatatctgcattctgcgttccggcaatttctcaagggtattatttatcagcttctgaagttcttcatattccatctgctgatgaggatctgtcgcctgttccgaagaggatgcagtcagcacagactctctataccgctctttgacctcttcatgctcacagtattgaattgactgattacgtgtcgccctgtagaggtagttttttacagactggaaaatctgtaactgttccctatccttccaaagcacataaaacagttcctcaacaatttcctcagccacctccatccgtccggtaatgcttgccgcataccaacacaagggagaatagtaacagcgaaatagttcctcaaacgcttttatgtcacctgcctttatttttgtcagtatgagcagttcattcagcatacttctatcattttacgattgttcccaaatataagaaaacaattctgattttaattagattgctttttcaatttatcgacagcatgttccagagactccgtaggtgctatgatattataatttccccagaagtcttcactccagtaatttccgactttatcatagaaaatctgattggaggtaaatactttattctgcggaattatctcggacggactctccctccgatctgtcaccaccatttctgaggttactgcatagctcgtagagaaaagcctccgtttccagtcgcatttaaaacgaatatcattgcggatataattcagataagtccttccatctatcgttttataggttatcagaaaagataactcttgcggtttgaatctcagtccaaatggtttctgatgaagaatagcagcaattgctttcgatttattctgcatatccagattcatctcgatacgtgtaaacgacagcttatcacaatctacatacaatttcccatgaaacagcgcatatggtaaaagaactctcggacggaaattaataacatattgtatccggttatcgatcaatgccgattcagccatccagaactcatagttgttcaattcttctggttccagcagcgcctctttattctttacgatatccaaaactacagatatattaggaccacccataacctttactgccaatgtatcactaactttctgacttagcagacggcgtcctttcagaacctgtagtttatcataatccgtagtgcgattggtgtatgctgttttcgacacatcaagtacagcttccgatacactgatataacggcgccctttctgcacagtctcccgatagaagctggtaagcatattccggttggcactataatttaccggaatcttctcaatcgccttttctataattgtacgcggattattggcataaacgaccacttcattcaactggttagtatgaggtatcatccagaccgtcaatttagaagaattattcttatctaaagatacatgactattgatatagcctatgtgagagatttccaactctcgcggcacttcttctttcctgactttcagagcaaactctccctctgcatttgtcaccgtaccgatattacttccttgcacagatacattcacgttttcaagtgttctcttattttgcttatccttcaccattccgacaatcgtgaaataatctcctgcatcctgcgcccatatatcagcactccctatccatagaaaagctaataaccatccaaccaaaagtataactgactttttcatcttaataaagttttaaagtaaataattcctgcttctataaataagatcgttcaatctgcaaataccctattgtctgaaataaaaaaaatcagtatcttgcccgacagacaaaaattatattctcaacaaatgattaattatgatacgcaaattagataaagcagaatttcagcaggcgacaactttagcattagaagtatacttgcaatgtggtcaggatgatttcgaagacgaaggtcttgagagtttcaaaagttttatattcaacgataaattaatgaatgaactctgcatttatggagctttcgaagagaataaactaataggtattatgggaaccaagaatgagggcaaacacatttctttgtttttcatcaaaaaggaattccatagaaaagggataggcaagcaactatttgactattcccaatatgattgtccggcaaatgaaataacggtaaactcatctacatacgctatcaggttttacgaatctctgggatttgaaaaaacaaacgacaggcaacaaacaaacggaatcagttatactccgatgaaactcatatcgaacaaataaagaagaagatattaccattagattccagttccccggagcccaaatctaattgttaattatactttcgaatatgtatttcttataaaaatagtttctacatttgcgactgttatggcgaaatacattttctgtatattatttggtatatttctgatatggggatgcaatttagtgcccgataaagaattacaggagttccggacagaggccggtactaccactatacaatcccataataagtcacagagttaccgatccaaagctgtagtcaaacaatccggtaaagaaaacaactccttccaagaagggaaatatgatggaaaatatgattgcaacattgccgatggtattttaggaaactcacttttatcccgtaccacttctctttccaaaattctaagattcaacgtttcttccgttacaattcggatactaagttccttaaaatatcaatttccgaaagaaaaatggactggtctcccctactacacaaatctcaccaaattctcctatcgatattacgtctatacactaggacgaatacttatttaaatatctcttttccttctatgggatgagatgagtgtatcttcatgcccattttatctctttatattcaaggcaagaaagcaagaagagtcttttccattgccgggaatatgcatacgatttcacttttacatattaataacttgatatataatggaatttatattagactttattctccacattgatcaatacacgattagtatagtgcaggattaccatacttgggcatatgctatcctattcatcattatattttgcgaaaccgggcttgtagtcactccctttcttcctggtgattctttacttttcgttgcaggagccatttccgcattacccggtatgccgatcgatattcatattcttgttttaatcttatttgcagcagccgtattaggtgactcctgcaactacatgatcggacattttttcggacgcaaactttttcataatcccaactccaggatattcaaacaaagttatcttgataaaacgcatgaattttataaaaaatatggtgggaaaacgattattctcgcccgctttgtgcctatcgtccgcacttttgctccatttgtagccggaatgggaaaaatgcattactattattttatgatctacaatctgataggtggagccatatgggtagttttattttgctatgcaggctacttttttggcgatctgccgttcgtacaggaaaatcttaaactcttgattatcgctattatatttatttcaatattgcctgcaataatagaaatattacgagcgaagttaggatcgaagcaataaaaaactttattcatttgtttattaataacaacggccatcaaattaaacatctcaaaaacaatttaatgtactcatatttatgaaaaattctttttttagtaaattcacgcccaaagaaccaaagttctttcctctactgaagcagttatcagatgttttatctgcctcatccgttctacttgttgaaagtctggaacatgatctgcccacagaaagagcagattactacaaacaaattaaagacatggaacgtgaaggtgacagattgactcatttaatctttgacgagttaagtacgacatttatcacccccttcgaccgtgaagatattcacgacttggcttcctgcatggatgatgttatcgacggaatcaacagtagcgccaagcgtattgtaatctataatccccgccctatttccgaaagtggcaaagaactgagccgtctgattcacgaggaggctatcaatataggtaaagccatggatgaactggagactttccgcaaaaatccaaagccattacgcgactattgcacccaattacacgatatagaaaatcaggcagatgacgtatacgagctttttatcaccaaactctttgaagaagaaaaagactgtatcgaactgattaaaataaaagaaatcatgcatgaactggaaaagacaaccgatgcagcagaacatgtagggaaaatattaaaaaacctgatcgtaaagtattcataaaagcagagcaagacacatggaattattagtgactatcattatactagctctgatattcgattatatcaatggctttcatgacgcagcaaactcgatcgctaccatcgtatcgactaaagtactgactccttttcaagcggtattgtgggcagcattctttaacttcgttgcgttcttcatagccaaatacattataggaagctttggcatagcaaacactgtgtcaaagacagttgttgaacaatacatcacgctgcctattatcttagcgggcattattgccgctatttcctggaatctgattacctggtggaaaggtattccatcttcttcctcccatacgcttataggtggttttgcaggagctgctatcatggcaaacggctttgaagctattcagctcaatatcattcttaagattgccgcttttatcttcctggctccatttatcggtatggttatcgctttcggatttactctacttgtgctttacatctgccgacgtgcaaatccgcataccgctgaaatgtggttcaagagattacagttggtttcttccgccatgttcagtgtaggacatggtctgaatgactcgcagaaggtaatgggtatcattgccgctgcaatgatagctgcccactctatgggtctgggaatgggaataaacagtatttctgatctaccggactgggtagcgttctcctgttttactgcaatttcactgggaacgatgtccggaggatggaaaatcgtaaaaacgatgggaaccagaatcactaaagtcacaccattggaaggtatggttgccgaaaccgcaggtgcttttacactttatatcaccgaaatgctgaaaattcctgtaagtacgactcatacgatcaccggagcaattatcggggtcggagcaaccaaacgtttatctgctgttcgctggggagtaactaaaagcctcatgactgcatgggtacttactattcctgtcagtggactcctagctgcatgtatttattgtgtagtttctctgttcctgaaataaattcagtttcaaataaaaaaggtgtatcagaactttttctgacacacctttttatatatactaattcagctaatcttacttgacttcctcgaagtctgcatcctgaacattgtcaccatgcttgctactatcctgaccagcattctgacctgcattcatatcaggaccagcctgtgcaccaccctgagctccgccttgagcgtacatttcagcacttgcagcctggaaaacagtattgatttctgccatagccgtatcaatagcagctaaatcctgagacttatgagcatctttcagtttctgcaaagcagcttcaattggagctttcttatcagcaggcaacttatcacccaattccttcaactgattttctgtctggaaaattacgctgtcggcctggttcagcttatcaatcttttcacgttctttcttgtctgcttctgcattagcttcagcttcagccttcatcttttcgatttcttccttgctcaaaccgctggaagcttcgatacggattgcctgttctttacctgtagccttatccttagcagatactttcaagataccgttagcatcgatatcgaatgtaacctcaatctgaggaacaccacgacgagccggagcgatacctgacaagttgaactgaccaattgacttattctgagcagccatcggacgttctccctgcaatacatgaatagttacttcactctgattgtcggcagcagtagagaaggtctcactcttacgagccggaattgttgtattagcatcaatcaatttcgtcatcacaccacccagtgtttcaatacccattgacaacggagtaacatccaacaacaccacacctttgatttcgtctgtcaaaacagcaccctgtacagcagcaccaacagctactacttcatccgggttcacacctttagaaggagtctttccgaagaaatcttctaccagtttctgtacggcaggaatacgggaagaaccacctacaaggattacttcatcaatatcagagttgctcaaaccagcatcgctcattgctttcttacatggttccagacaagcctgaatcaatccgtgagccaatgattcgaattttgcacgagtcaaagtcttcaccaagtgcttgggcacaccgtttaccggcataatgtacggcaagttgatttctgtgcttgttgaagaagaaagttcaatcttagccttttcagcagcttctttcagacgctgcaaagccatcgggtcctgagtcaagtcagcaccttcgtcatttttgaattcctgtaccagccagttgatgattacctggtcgaagtcatcaccacccaagtgagtatcaccgttagtagaaaggacttcgaatacaccaccaccaaattcgaggatagagatatcaaaagtaccaccaccaaggtcgaatacagcaatcttcatatctttgtgagccttgtccaaaccgtatgcaagagctgcagctgtcggttcgttaacaatacgttttacttccagacctgcaatctgtccggcttctttagtagcctgacgttgagagtcggagaaatatgcaggaacggtgataacagcttctgtaacttcttgtcccagataatcttcagcagtcttcttcatcttctgaagaatcattgcagagatttcttgcggagtgtacagacgaccgtcaatatctacacgcggagtgttattgtcacctttcactactttataaggaacacgtgtaacctctttctgcacctggtcccagttttcacccataaaacgtttgatagagaagatcgtacgtgtcgggttagtaatagcctgacgtttagcaggatcacctactttacgctcgccgccatctacaaatgcaaccacagaaggagttgtacgcttaccttcactgtttgcaattactacaggttcgttgccctcaaatacggcaacacaagagtttgttgttcctaagtcaataccaataatttttcccatgatcgttattctttttatttattattattcaatttctttttgtccggttgttttctttctctttgtaagggctttcaaacggacgctgattaaaaaacaaaccatgtgccaaaaagaaatcggacgaatacgtgacatattttctgccaaaacgacagttttaaatcgaaatgactgctgtcaagtcacatagaagctagacagctatcgactcattaaacaaatggaaacggctctggttcaataaagctaaagaatagatcataaaggaaaaaatatgcctgtatcgttatgtgcgacacaggcatacctatttaatataatacgtatatcttacttttcaagtacaatcaccaatgcattatttgcgtcatacaaaccgattccgccaccggaaagtttatcgaacgacttcacttcattcattgctttcagaatcttaccttccacttccatatcagggcaagccatcattgtgctagccaccccagggaaagagattgatttagcattagtagtgctagtttcaaaaccaccattaatcaagttacatccggcattgccatgaagtgttttctttttcacatcaaaagcaatgaaaggttgcttttccattcccgaaggaattgcttcaccattcacttcctttattttccattctccgttcaatactgatagtttcacgtcagcctcctttttttcaagaactacaaccggacgattggactcattgcaaagatacattttatccttaccggctttcttataccctttcacctgtgcaagcgcacctaacacatttctctcggtagtcatgtccggacacatcattctggtgctagccattcccttaagctccatactgcccggcttggcattcacgtcaaagctacccatcatacggttgcatccactgttaccggatactcttccggtcgctgtatcaaaagtaataaaaggaagggttctgctttcgcccggagttactttcgagccgttaacttctataatattccactcaccattgattgaagccaatgggactgccttctcaaccgaacggcatgaaaacattgcaagtactgtgctggcaatgcaaattgaaacgaatactttcttcattttgttataacgtttaagttaaaatcgggggcaaagatatcaaaaagattgggaaataccatctaatgcgatataaaatacatacatttgccattatctataaaacaaacaataagattacatagttcatctaaagtaaataaatatgagaacaattgtcctatttctaatcctgcttggttgtggtacctctcatatcacagcgcaaaatgattatcttgtcactactattcccaatcaggaggatcctctaagtgaagaagaacagttcataaaagagaacttcccactgcaacttttatgtaaatggacacccggaatgaaattcatgtttattccatccggacgtgacatgttcctccccaccctttcggtgtatgagacagaaaaaggggcagataacagcgttttgaaacacaagattcttactttcgccggatatgaagaaaaatctcaaaaactatcaaatgacatgagctattccactcgactcatcttcgaatgtgacggagaaaaatattattatgagattaaaaatacacgtccggatgaaatttgcgaaaagaatccccgtgcctatatcaacggattagttaatctgaaagatgtagacacggcaaaagatttactgagaggcagaaagatatatgttcagtccgatatggcacaggtggacgatgccaatagttactccggatatagggaagtgtctattccggtcaacaccgaagcaaccattaccgccataggagttggcagtcaggcatatcccgtgaaaatcatatttcaggattcgcagggacatacctattatctagaagtagctctttcccgcactaattccggtatggacgtgagcgatttccaagctgaaaagaaaatgagatatttttccaacgccatcagtttcagtagcaaaaagtccggaaatctggaaaccttgaaagacaaatatattgatctgaccgtctatccgaaacggacattggctgtaaaaagagtcttcaaccttgaaaacaagcaaatggaaaaccgcatacatttgcctcgctacactgttttgaaaataaaagaagtaaaaatctccggtccgggaagtctggttatcctctcactggaggatcggcatggatcactttatgaaacagaggttgacctaaaatatgacgttatcgtcaaaaacgagaattatattgaagaccttttcggatttggagacatccatcagaagtatccggctatcacagataaacgttgggcaatcatcgcacggggtgatttggaagaaggtatgaacaccgacgaatgtcgtctgtcaataggtgatcctgtagaaatacagttaaaaaaagacagtcgtttcgaaacttggttctacaacggaaaaacgctggaatttgagagtggcatcttgcaacgtttcaaataaaaaggagtagcgacgcggtgattatctgaaaataatcacgtatatttgccaagctaacaattctaaaatcttaatttttgatttataatttattaattaaaagaaatgggtagagttcttattatcggtgcaggcggtgttggtactgtcgtagcacacaaagtggcacaaaatgccgatgtattcacagacatcatgattgccagccgtacaaaggagaaatgcgataatatcgtcaaagctataggcaatcccaatataaaaaccgccaaagtggatgcggataatgtagatgaactggtagctttattcaatgactttaagccggaaatggtaatcaacgttgctcttccttatcaggatcttaccattatggaagcctgtctgaaggcgggtgtcaactacctggatacagccaactatgagccgaaagatgaagctcattttgaatacagctggcaatgggcttaccacgaccgtttcaaggaagcaggtctgactgccattcttggttgcggtttcgatccgggagtcagtggaatctacacagcctatgcagccaaacattatttcgacgaaatccaatatctggatatcgtagactgtaatgcaggaaatcatcataaagcatttgccaccaattttaatccggaaatcaatatccgcgaaattactcagaacggacgttattacgagaatggtcaatgggtgacaaccggtccgctggaaatccacaaagatctgacttatcctaatattggtccacgtgattcctatcttctttatcatgaagaactggaatcgttggtcaagcatttcccgactatcaagcgtgcccgtttctggatgactttcggacaagaatatctgactcacttacgcgtgattcagaatatcggcatggcccgtatcgatgaagttgattataacggaactaaaatcgtaccattacaattcttgaaagcagtattgcctaacccacaggatttaggtgagaactatgaaggtgaaacctctattggttgccgtatccgtggcatcaaagacggaaaagaacgtacttactatgtctacaacaactgcagccatcaggaagcttacaaggaaacaggtatgcagggagtcagctacaccaccggtgttccggctatgatcggtgccatgatgttcttcaaaggcgaatggcaacgtccgggtgtaaacaatgtagaagaatttaatccggatccgttcatggaacagctcaataagcagggactgccttggcatgaagtgtttgataaagatctggaactataatagaacgagtcagaatgaagaatataggagataaagcaccggaagtattaggtatcaatgaaaaaggtgaagagatccgcctaagtgcttataaaggaaaaaagatagtactgtatttctatccgaaagacagtacatcggggtgcacggcacaggcatgcagtctgcgcgacaactattccgaactgtgtaaagccggttacgaagtaatcggtgtcagcgtagacagcgagaagtcgcaccaaaaattcatcgataagaataatcttccttttacgctgatagccgatacggacaaaaagttggtagaagaatttggtgtatggggagagaaaaagctgtatggacgtgcctatatgggaaccttccgcactactttcctaatcaatgaagaaggaatcatagaacggattatcactcccaaagaagtgaaaaccaaagagcatgcctcacagattttaaatcaataaatccattaattataagaataaggtatggcaaagaaagacgaacttaattttgaaacagataataaaatggcatcaagcgaaaaactgaaagccttacaggctaccatggaaaagatagaaaagaacttcggtaaaggttctatcatgaaaatgggtgatgatagtgttgaacaagtggaagtgattcctaccggctccattgctttaaacgtggcacttggcgtaggaggatatcctaggggaagaatcatcgaaatctatggtccggaatcttccggtaaaacgactttggctattcacgccattgccgaagcacaaaaagccggtggtatcgccgcttttattgatgccgaacatgccttcgaccgtttttatgcagcgaaattaggcgtggatgtagacaatctctggatttctcaaccggacaatggagagcaggccttggaaatagccgaacagttaatccgttcttccgctattgatattattgttattgactccgtagcagcattaactccgaaagcagaaattgaaggcgacatgggtgacaataaggtaggtttgcaggcacgtctgatgtcacaggctttgcgtaaattgaccggtacagtcagcaaaacacgtacgacttgtatctttatcaaccagctccgtgaaaagattggcgtcatgttcggtaatccggaaacaacgacaggtggtaacgcattgaagttctatgcttctgtacgtatagatatccgtggcagccagccaatcaaagacggtgaagaagttcttggtaaactgactaaggtgaaagtggtgaagaacaaagtagcacctcctttccgcaaagcagaatttgacatcatgtttggtgaaggtatttctcactccggagaaatcatcgatttgggcgcagaactgggaatcatcaaaaagagcggttcatggtatagctacaatgacactaaacttggtcaaggacgtgatgcagccaaggtatgtatcaaagataatcccgaacttgctgaagaactggaaggattgatcttcgaagccttgaataaaaaataagttgtttcaaccgattcaactaagaataaataatataagctgtctcaaaacatcggatgagacagcttatttttagggacattcattaaatattacaaaatcagccaactaattcatacacaaagtattgcgaattagttggcttttttgtatctttaggtattcccccgaaaataaggtttgacggccaaaacgggggaaatatccaaactaataagatatggcaaagatagtgaatgtttcagaaattcaccctactttgggttttacagaatttgatattctggaaaaataccgcaagagttttaatgagagtgagcttggcaagcttcattcggtctttccgtttgaatgtatggcaaaagccgcaggcctgtcggaccggcgcctgggacgcaggaacagattcagtccttccgcaaagatcgcccttatggtcctgaaggcatacaccggattctccgacaggcaactggtggaacatctgaacgggaacatacactaccagattttctgtggaattatgattcccccgtcccttcccataaccaacttcaagatagtcagtgccatccgtaatgagatagcatcccgccttgacattgattctttccaggagctcctggcttcacactggaaaccttatcttgataaccttcacgtctgcatgaccgatgccacatgctatgaaagccacatgcgttttcctacggacatgaaactcctttgggaaagcctcgaatggctctacaggcatatatgccggcattgcagggagctgggcataaggcgtccgcgcaacaaatacaggaatgtggcggaatcctatctgtcctactgcaagaaaagaaagaggagagcttcaaggacaagaatgcttaagcgccgtatgatcaagcttcttgaaaagctcctcagtcaaagggatgggatccatagcgagtacggtgctttactccgatatacccaggattatcataagcgtctttccatcatcagaaaggtgcttgtacaagaaaaggaaatgtttgaagggcggaaagtcagtgaccgcatcgtcagcattgaccgtcattatgtacgtcccatcgtcagaggcaaggaaaccaagtccgtcgagttcggtgcaaaggtcaataatatacagatagacggcatatcgttcatcgaacacctctcgttcaaggcattcaatgagggtatacgcttgaaggactgtatccgtatgcagcagaagcttatgaatgtaagggtaagatgtgtggctgccgattccatatatgccaataatgccaacagaaagttctgtacaaaatatgggatatccacatcctttgtgcgcaagggaagggcggccaaagatgagcctttgaggaaggtgcttagaagcgaactctcaaaagaaagggcaacacggcttgaaggaagcttcggcactcaaaagcaacattactcgctctcaaggataaaggccagaaacaggaagacggaaatactgtggattttctttggaatacatacggcaaatgccatactgatgatagaaaaaatcagaaacaaagcagctaaagcagcatgatatgattttactcacagaatcagaagaggtcatcagacttcttccggaacgtcatgtcctgtcggatagaattatgtgagaaagcacggaaaaatgacaataagaatggcatatgaaatggtcatgccctatcatcttcatatgccatcttattttttagagacatttactgaatatccctgtttagcttaaacataaaaatgtcccctatctgaatttgtactgtgagaattcagataggggacatttctttcactttttatatgaaatagatataggctaatgtacttaaactaataactacccataacaaaacgccttggatcaaaggtttgacaccgacagatcttagaacatccaaagaaagggaagcgcctataaaaaacatggtaatagttaatgtcttgcgtgcaattccattgatggcagcacccaactgtggcacgccattcagtaaatatgtattcgcaatcatagccagaataaagaagaaaataaaccaaggaatacttatcttctgtcctttacttttaaatataaaagaagtggcgaatgccattggtatgatccaaagagcacgggtcaacttgatagttgtagcaaccttcagtgcttcttcaccataagcagcacctgctcccaccacagaactggtatcatgaatagcaatggcagcccacgtgccaaactgatgttcggtcatatccaaagcatgtccgatagccgggaagataaaaagcgcaatagcattcagaataaagatcgttcccaatgccacggacatttcactgtctttggccctcagcaccggccctactgccgcaatagcactaccaccacagatagcagttcccgaactaatcagataggaagtatttctgtctatcttgaatattttacgaccaataaaccagccgatgagcaacgtgcccaccacagaaataacagtgaactccatcccttctttaccggatgccaaagccgactgaagattcataccgaatcccaatcctactacagaatattgcagcaaatatttagatgtctttttattaaatttgggatgtgcctgtccgcaggttaatgcgaaaataagtccgagaaacaaagctactggaggagtcacccatgcggaccatgcttgtaaaccaggaatataatctaaaaataagaaaaaagttaaagtagaaagtattgcaacgtaaattgtcttgttgttggtttgcaacgtttttgtagcggttgaaatcatttttttatctttttataattttgcgggtgcaaaggtacggcaaacaatcaagacaaaccaattgtttctaattatctattataactttttgttatagtcacttctcttattgttacattatgctcctacgatgtcctttccaaatggtgataatgctaacgcagccaacttaaagtgctgcaaaccaaagggaataccgataatggttatacacagaacaattccgaaagccaaatgtgacagacaaatccaaatgccacccaaaaataaccacagaatattcatcagtatataaagacatccactcgaacgcctgccacttctcacctctttaccgaaaggccataaagcaagtccggctaactttaacgtctgtataccaaaaggaatacctacgatcgtaaacatcatcagcagacttgaaataaggtactccactgcagtaaagataccaccaagcagcaaccacaataagttcataaaacaacccatatatatagtattagttattttccacattcgactatacaaagatacagaagaaatatgagaatttaaatggcttttttataaactttctcttttactatttcatcgaagctttatgcaaaatgatacgttcaatggctataccttcgtttccttgcagatcaaatactatccctttttactgagaaatgatgagagactaaatctttttttatttttttagtagatagtgaaaatctatctgctctgccaagagatacagtttcaccacatcatgaggtagccctgcagttgggatatgattcgcatgaaaagaagcaacacctacaagttcttgctatgatgccccgcaaagcgcataaaaacttgagataatcctccctcctgcccttgtagctgcacaaaattaaattcgcgcaacattggcatcccttttatctcaactacccgtaaagtgccggccacaagttctttatgcaccgaccggatagaaacaattcccatacaatcagtatgttccaaaaagagcttgatactctccgtaccaccaagatacatcagaacattcaaagaagacagcttcagattgtgttgcgacagggctcgttcaaatacatccaacgtccccgaacctctttcacgcaaaaccaaagggatattcggcaattctgcaggtgttacctcctcctgaatatttagtttactgttcacatgcactaccgcaacaagttcatcttgcaaaaacaaagtatatttcagattaggtaaacgaaaaataccttccaccaatcccaattcaatccggtgttcttgcaaagcaacctccactccccgagagtttccattaaggacggaaagattgacttgtggaaacttcgcaataaaatgagccaataaagggggcagaacatattgagcaatcgtcgtgctagctcccagtttcaactctccaatatactcgttatgcaacaaatgcatttcatattcaagccgcttgtaatcatctaaaatcttttcgctatgcttcagcagtaattcaccggcaacagtcaatgagattttacttccctgacgttcgaacaaacgagcctgataataagtctccaattcctgaatatgcttagtgatagcaggctggctgacaaacaattcttgcgaagcctttgtaaaactcagattcttcgctacgctctgaaatacttttaaacgaaaatcggacacctttttatttgagttatttgaggattaaaattcaaaatcaagaattaaacacaaggactatagttcttcagctctgattcctaatgcctgcataacaggaaatgccaacatatcccacttatactctacctgcacttcaggctcattcatacgaaactggataatctccttgcctttcacttcatgcaacgcatcggatactttctttccatattcttcattgaaagaaacgacaatcatccttttcacatcagccgaatcagcaacgatagacaataaatccaaaaacaaatcttcgcgtgaaaccatcccttccgaaggaacacttgcaaatgaatattcaccataaggactctgaaaagcgactccattcaactccttcaccaaatcggaaggatggcaatgtacaagctgatcggactcttcatcgtaaacaaaaagaaattgtacttcatttttcccttccgtgattccggcatccagagtcagataagtggtcaacatagaaaggtcgatatcctgtaaagaacgtcgcaaagtctcttcaaagtaacctttcatatctgtaattacaaaattcaagaaagcagcatcaatcaacactactgtttcagacagttttatttgaggtttatcattcataccttatttataatatgattacagcggataaagatactacaatacttttatttattcacttcatttcgcggcaaattcgtcagtatcattcagatgaaaaacgtcattttgtcttctaactctcttattatcatgctattttgtcatatttttctacttggcaaatcttttgagccctttcaagtgttattaaaatcatgaaaaaagaaaggagaacaaccatatgaactttaacaattttaccatcaaatctcaagaagcggtacaggaggccgtaaatctcgtacaaagtcggggacaacaggcgattgaacctgctcatatcctacatggagtaatgaaggtaggcgaaaatgtgactaacttcatcttccaaaaattaggaatgaacgggcaacaggtagccctagtcgttgacaaacagatcgattctttgcctaaagtatccggaggagaaccttacctaagtagagaatctaatgaagtattgcagaaggcaacccagtattctaaagaaatgggagatgaatttgtttcattggaacatattctgctggctttgctaactgtgaaaagtaccgtatccaccatcttgaaagatgccggaatgacggaaaaagaattgcgtaatgctatcaatgaactcagaaaaggagaaaaagttacttctcaatccagtgaagacaactatcagtcattggagaaatacgctatcaatctgaacgaagccgcccgcagcggcaagctggatcctgtaatcggacgtgacgaggaaatccgacgggtactgcaaatattaagccgtagaactaagaacaatccgattctgattggtgaaccgggtacaggtaagacagctatcgtagaaggattggcacatcgtatcctccggggagacgtacccgaaaacctgaaaaacaaacaggtctactctctcgatatgggagcattggttgcaggagcaaaatataaaggagaattcgaagaacgactaaaatcagttgtcaatgaggttaagaaatcagaaggtgatataattttgtttattgatgagattcatacactggtaggcgccggcaaaggcgaaggagcaatggatgctgcaaatattctgaaaccggcattagcacgtggagaactacgttcgatcggtgcaaccactctcgacgaatatcagaagtatttcgagaaagataaagcattggaacgtcgtttccagattgtacaggtagatgaaccggatactctgagtaccatttccatccttcgtggattgaaagaacgctacgagaaccatcatcatgtacgtatcaaagacgatgccatcatagcagctgtagaactgagcagccgttacatcactgaccgtttcttgccggacaaagcaatcgacctgatggatgaagcagcagccaaactacgtatggaagtagattctgttccggaagagttggatgaaatctcacgtaagatcaaacagttagaaatcgaacgtgaagccattaagcgtgaaaatgataagccgaaactggaaattatcggcaaagaactggccgaactaaaagaagctgaaaagtccttcaaagctaaatggcaaagtgaaaaaacgctgatggataaaatccagcaaaacaaagtggaaatcgagaatctgaagttcgaagcagagaaagcagaacgtgaaggagactatggaaaagtcgccgaaatccgttacggaaagcttcaggctctggacaaagagatagaagatacgcaggagaaacttcgtggtatgcaaggcgataaagccatgatcaaagaagaagtggatgctgaagacatcgctgacgttgtttcacgctggacgggcatccctgtcagcaagatgatgcaaagtgagaaagataaattattgcatctggaagacgaactccatcaacgagtgattggacaggacgaagcaattgaagcggttgcagatgccgtacgtcgtagccgtgccggattacaggatcccaaacgcccgatcggttcttttattttccttggaacgaccggtgtcggtaaaactgaactggcaaaggcattggcggaattcctctttgacgatgaatcgatgatgacgcgtatagatatgagcgagtatcaagaaaagcatagtgtttctcgtttggtcggagcacctccgggatacgttggatacgatgaaggtggccagctgacagaagccattcgccggaaaccttactcagttgttttgtttgacgaaatagaaaaagcgcatccggatgttttcaatatcctgttgcaagtactggatgacggacgactcactgacaacaaaggaagagtagtcaacttcaaaaacaccattatcatcatgacttcaaatatgggaagttcttatatacaaagtcagatggagaaactgagcggttcgaataaggaagaagttatcgaagaaacgaagaaggaagtgatgaatatgctaaagaaaaccattcgtccggaattcctgaatcgtattgatgaaacaatcatgttcctgccgctgacggaaactgaaatcaagcaaattgtactcttacaaatcaaaggtgtacaaaagatgcttgcagaaaacggagttgaactggaaatgacagatgctgccttgagtttcttatcccaagtaggatatgatcctgaatttggagcccgtccagtaaaaagagctatccagcgttatttactgaacgatctgtcgaaaaagttattgtctcaggaagtcgacagaagcaaagcaatcattgttgactcaaacggagacggattagtgttcagaaactaaattatagttagttgttataaggatagccggtatgttctcaagtgagcatatcggctttttatattcctgaatatataattcttcttacttccggctgacaattaggatggctcatgactaagacataagtaccttttctagatatctccaaagtgagtgaaggcaaggcaaatctatgtttctctttcaactccccctgcgaatcatataaaaataccattgtacctaccaacattcctgttaagcacaatgttcctttttcattatcaagataaacgtttacctctttatttgttattacatccatattttgtgcgtatattagcagtcacaaagatagagaaaaactatgtttatttactatataaacaataaaatattcatgcaaacataagattgcttaaagaacactaaaggggatcctttaattacgcagacatataaaaacacaaaaaagcgtgacaacttgcaacattgtcacgctttccttattacatttatgcatctaagccatcaatgtttcatgacttatttttcatcagtcgcaacctcttcttcagcttccggctctgatttaaattctgtaattccattcgaaattaagatgttataccaggaaatcaatttcttaatatccgcaacgtatactctttcacgatcaaagttaggcaatacctcccctaaatactcgcgtaactgctccggagtagcttttttagggtcaatggaggtgactgcagtattttcttttttcttcatagcttccagcacatcatacaaaggtacttcagcatcatctgtatacattgctatatctgccaaagagataattttctcattaccataagcggggaaacgttttttatctgcactgattgattcaacaatcaacatattttttccttgcgaaattagtttgtacaatcccggtttaccggagatagacaggatagtcttcaacatagtatatattcttttatttattaaattatttttttgcggagcaaaggtaatgattatttttagatagcaaagaaataaacttcaaaacctgcggaattaaaggggtttcatcgtcattcacgattacaaaatcagcatgactccgctttacctcatcgctcatttgcgcttcgatacgtttcattatcaattcccttgaagaatggtcacgcctaattgctcgttccactctcacctccaacggtgcatataccattactacaaagtctacttcctgcttaaagcctgcttccagaaggatggcagattccataccgaccatagctatatcacctttccctttcacccatcgcctgaagtcttctttcacctgcggatgaatgacagcattcacttttttcgcatgttcggggcttccaaatgtataagatgctaataaaggacgattcaattttccattcaggaaaacatcctgtccgaccaaggcgcaaagttcccgacgtatcacgtcattcgtatgagtgatacgcttcgcctcaatatcggaaatataaacggggattcccataatctccagcaatctggaaactatactttttccactaccgataccgccggtaatacctattttaatagccatcggaagaaacttgttctatcagaaaatcaacttgctcgggtacaatacggatttgattgattccacggggagccgacttcaacttcaccgtatatttatccgatcctaattttagcagttcctcataagaaacattaatcacaaaatcactggctttaatgctacgaaaacgctttaaacccacttgaaaagtaatttgaacctttgatggaaaagcacggagcactttatctgccgggaagttaatcccacgcaacggcacctccacggttttctcagtataaatatcaacagggaaagtcagttcaaccgaggcgggaacaaacttcactccttttttattatccaaggcaacccgctgccgaatcgtatccgatatattttcaagatttacctcttgagtataagcggttgttatagtatccaaaattccggccggagcatataccaatacggaatccggactgcaaatggtatcagaaacataatattgaagccctgcagtcacttttccttgaaaatgaacgggtactaatttggacttgcctgtcgaatagatataatctaacgtatcaggttttattgaaagtatcttagaagaagcattcaattgactgagtatcttcttttcaaactcagaggcaaagattttcacgtgattattttgccctttatagtcagagaaactcagatttaccggaaagaaactcttccccaacatataattgagaagcactgttcctttatcttttacccggacgcgaagttcggaaggaggttccgaagtgagcacaatattattagggacatccttcatcctcaccgggatagagaattccgcttcatagtcattattaagagtctgaatcagccaaaatccaccggctatcaggaaaaaaaataaaaaaattaagaactccctgcttttatcactaagcaggaaatccttaattcttttggatagtcttaaatatgtatatcttaatttcctacgatcaagcatagggtatttgtttactaaagattatttagactgattgccggcagccgaagcatcagcaaaaatagaattcttatctattttaatcttcacgttagaagcgatttcaagtactatataatcatcagtaatctctttgattgtaccatggataccacctgcagtaattaccgactggtttacctgaagagatttacggaaattagcaatttctttctgcttcttattttgagggcgaatcataaagaaatacatgataacaaacatagctatcagcatgatccacatcatacttccacctcccgctgcgggagcttgcaataatacagtcaataagttcataaataatcaagttttagtttctactatatggacaaaggtatcagtttttagtcaacttaccttcttttttcaattgattaactattccatccagcgttccgttgataaagctaccgctcttggcagtgctatacaacttcgcaatttctacatattcatttaacgaaacacttaccggaatgttcgggaaacttaaaatttcggctaaagcagtctgcataatgataatatccataaatgcgatacggtccaaatcccagttcttcgtgttctcgctcacaagatgacggtaatagtcagcattcagaattgtacgacggaacaagcggcgtgcaaattcctgatcttcgtcatccttgaattcgggaagtaattcctgatttgctccgttcttttcttcaaaacgcttaatcgttttcaagacaaaggtatctacaatctctttatcgtcattccaatacagactctggtcttccagcacctgatcaagagaatcattattaaagatatatgttttatagagttttctccacaattcgcggtcagcttcatatgaattgtcaccggaagccatataatctttataaatatcgctttctactattttctcataaagctctttgacgaaatcctgatcatttgcccaagttctcttctgattagatataaactcggtcagttgcttgttcacctccaactgtgcaacaaacttattatccacaaactttgtgttgggatacaactcttctttagtaggagccagttttgcttttgccgcatcaatgcgtttttgtgcatactctgttaatgccatcatcagcattaacaaataattataaaggtcatacgcctttgaaaggctgaagaataactctttctccgctgagtctagatttttgctgccattttggtaataggcatacactatttgtataatcttaagacgaataagaactctgttgatcataattcaaattaatactgttattatcgaactgcaaaagtagatatttttaatgagtttccacaaataaatcacattttttaatgcagtatttgattctctgcgctttttcttttgacagtttaaaaaaaatatccaattttgaggccgattattaacggacccaatgatatggaagattttaaaaagaaaatgaacgcagacatgaatgataaggagatcgttttctccaagtccatcaaagcaggtaaacgcatctattacctcgatgtgaagaagaaccgtaaagatgaaatgtttttagctattacggagagtaagaaagtggtgatgggagaaggagatgactctcaggttagcttcgaaaagcataaaatcttcttatataaggaggattttcagaaatttatggcaggattgacagaagccatcagttttattaaccacagtgacatgaacgattacatcagccgcctgaacgaagaagctgatataaaaagagaacaggaagctcttgccgaacaagcacaagaggacaagctggaaaacgaaattaagattgatattgacttttaaagaggtaactctttgatatttcaaaaaaaaacagtacttttgcaccgcttttttgcaacatcatgtgataatccacatcgtgtaatggtgaattaagcaaaataacttaatttagagtaacacaattttttaagaaatgaaatcaattgaagtaaaaggaactgcaagaactattgcagaacgctcttcggaacaagcaagagctttgaaagaaattcgtaagaacggtggtgtaccttgtgtactttacggagctggtgaagttgttcactttacagtgactaacgaaggtcttcgtaacttggtatatactccgcacatttacgtagtagatctggatatcgatggcaaaaaagtaaacgctatcctgaaagatattcaattccacccggtaaaagacaacattcttcatgttgacttctatcagattgacgaagctaaacctatcgttatggaagttccggtacagttggaaggtcttgcagaaggtgtgaaagccggtggtaagcttgcattgcagatgcgtaagatcaaagtgaaagctctgtacaatgtaattcctgaaaaactgactgttaacgtttctcacctgggattgggtaagactgttaaagttggcgaactgagcttcgaaggtcttgaactgattagcgctaaggaagcagttgtatgtgctgttaagttgactcgtgcagcaagaggtgcagcagcagccgctggaaagtaatttgagattatccctgtaaagagatatagcaaaacgcagattaatgcagattaaagcagatgttcagtctgcattagtttgcgttaatttgcgtttttctttttatattcacgaactgttttttacgaaaaaacaatgatcaaatatctaattgtcggactaggaaacattggacccgaatatcatgaaacccggcataatattggtttcatgacagtagaggcattggcaagaatcaacaatgctcctccctttattgacggacgctacggatttaccactagtttttcgatcaaaggacgccagttaatcctgctcaaaccgtcaactttcatgaacctgagcggactggccgttcgctactggatgcaaaaagaaaacatccctttggaaaatgtgttaatagtagtagacgatctggctctccccttcggcactctgcgtctgaaaggaaaaggaagtgatgccggacataatggtctgaagcacatagcagccattttaggaactcagaactatgcccgtttacgctttggtatcggaaatgacttccccaaaggcggacagattgattatgtactcggacactttactgacgaagatcgcaagacaatggatgaaagactggaaacagccggagaaatcattaaaagtttctgtctggcaggtattgatattaccatgaaccagttcaataagaaataggagtatttacaattgactatttcacagcgtatatatgcaaacggtcattaagtactccaccatgacacatggtacactgttaattaataaattatcaatatatggcagaagcaagaatagataaatggatgtgggctgttcgtattttcaagacacgcacaattgccgccgaagcctgcaagatgaaccgtgtcactatcaacggagcatacgtaaaggcatctcgcatgataaagccgggtgatgtagttcaagttaagaagccgcctattacctattcattcaaagtgctgcaagctattgagaagcgagtaggcgcaaagcttgtacccgatgtaatggaaaacgttaccactcccgaccaatacgaactattggaaatgagtaaaatcagcggattcattgatcgcgcacggggaaccggacgtccaaccaaaaaagaccgcagaagtctggaggaattcacagctccggaatttatggatgattttgatttcgactttgatttcgacgaagataagtaaataatgaacggtgaataaacttatagcatgaagttacaagtttattcaccgtttattattttaccaactgttgattacagatttgctttcacagcatcaattagctcctgatattcagtatcggtcaaataaacttttcccggattcatctgaaatacaccgccataatcaggtccgtctacatatttcggagccagatggaaatgcaaatgagataatttatctgagtaagcaccatagttgatcttttccggctggaaagctttctgcattgcacgggtaacacgtgccacatcagccataaatgcattacggtcttcatcgctcaattcgttcaaatcatttacgtgatccttgtaagcaacgaggcaacgcccccgataagtttgctctttaaacaaaaacacacgtgatacactaagctgcgcaatctcaatcatcagattatgcaacgtttcattgttctggcaatacagacattcttttggatcactcttcatgatattcttatttttatgttttgacaaagcaaaaatagtcgttctgcttttatttcacctgtattttttcgtttttttgatcgactaattggtacacgttctctttttcaccaacaacccacactacatccccctcttcgaacggtgcatttacatccggcaccatcagagtgccatcttcccgttccacaccggctatcatacaatgatacttatcccgtatacccgattcacggattgttttacccagaaaaacggagtctgcatcaataatgaactgcttcaaagtcatctctcccttctcatacatctcccagtctatcttcgcaccactttgcatggcactgctaaatacattcaattgttcgtccgttcctattacctgtatcttgtccataggaaaaagacgcaccgagccaccgggaatattaatccttctctttccccgcaagatagaagcgatatgaatgccatatttctttcccaaatttagttccatcaacgtttttcccgcccaagtggattcccccggaatctccaaatccgccaaatgcagatcatgagataacagacgtccggcatattcgggtttcttctctcccaaatattctgcacgcacctctctggaacgcagattttgaaagaaacgccgttctatcaatatagattgctttttcaaacgacgcgaccataccatcaacaagactgcaagcacagccactccaataatcaatccaatagatgccttaaacaatcccgatatcacaaaaatgacaaataacgccgcaatcataatacgtatgacaatagtagacaccaatggtgcacgattggcacggttatcatgccacagggtcataaattccaccgaatggtttttcttcaccatgatagcacgtaggaaaggcgaaatgcaaaggataataaaaacagcccccaataatgatgcccagaaatgaggcaggttctccttaaagaatgggacgacaaaacggaaagacagtgcaataatggatatactgactattgaatataccacagttatgcgtaccattgccagcaacagcttcttccacaaattctcatgattaagtactgtttgcgagcccgaagaataacgcattaagaactttctccaggaagcgggtaaatgagcatccacaaaagaagaagccggttcagccagacgaatcatataaggagtcaggaaagtggttatcacagaaactgctaccactatcggatataagaaatcgctcgtcacgtgcagagatacacccaatgaagctataataaatgcgaattcaccaatctgagtcaaactgaaaccgcactgcatagccgtcttcaagggtttgccggaaagaatcacgccgaatgttccgaaggtagcctgccccaaaataactgcgatcgtaattacaatgataggtattgcatattcaataatcattgcaggatcgaccatcatccccaccgatacaaagaaaattgcgccaaaaagatctttcaccggcttcaccaaccggtcaatagattccgcttcgattgtttctgccagaatagaccccatgataaacgcaccgaatgcagcagagaaccctgtattggctgccatcactaccataccgaaacacagtgccaatgatacgataagcagagtttcctctcccatcagtttcctgcaacgcttcaaaaactccggaatcagatagatacctactacaaaccacaaaataagaaagaacagcagtttaccaatactctccagcatctcggtgccttcaaagttatggcttaccgccatcgtagaaagcatcaccatcaatacaatagccagtatatcctctagaatcagaatactcagtacaagcccggtgaactgcttcttcctcagtcccaagtcatcgaacgccttataaataatagtagtagaagacatcgcaatcataccacctagaaacagactgtccatccgatgccagccgaatcccataccgacacctatccccagcaatatcatacaaaagatgatggtgcaggcagcgatgatagcagaacctccgacttttacgattttcttaaaactgaactccagaccaagagcaaacaacaagaagataacgccaatatccgcccatgtcttaatgttggcggtatccattactgatggtgtataaggcatgtgcggacttgccagaaaaccggcaaccacatatcccaacaccaaaggttgctttaacttcttaaacaacaaagtcatgacgccggcacagatcaatatcagcgcaagatcggcaatgagtgtaggtaattgagacattgtttcatcgtatttggtgacaaaattaaaataaatctatcgtataaacaacagattcacggatatgttttaaaccaatggcaacaaacagcccgcacaaaacatctaattacttatataaaacattattaattatgtaaaaaatcgatagcctatcctttaatagataaactaccgacttcattttatgatactaattcccgaaccacaaccttcatttttccgttgaatttgataaaaggatatgagaattatttatcgtagatatttgaaaactatcaaattattctaaaggagtaaactctttatattctctggacatatttatttccccatattctccccatcggtcataaatggcaaatttcttggttgtaagttcttctatatcccaataatgatccgaaccaaaataaattgtactggaactctgatcataaaaagcccatctcatattaacaacacgtcgttgttcttttccgtttttatcagttacaattaaagtttgagtacacgtaccatctcttctaaacgtatacagcccttgaatcgtctcgtcagcatcattgactgttttttgactagcccatgttacatcacatatcagagatatgacatcatcttccgcctttgtataatatccggtcttctccacacagcctgtcataagaaaagccatgataaaaacgagtgatacaaaaatcctacttttcatcaacgtaagaatttgaagtttgcaatacagggagcatttaaactcgtcgtttcaaaattccattctgcataatctccctgagttacagaccattcaaaacaaggattgatattataaccaattccacaaaatagcactcttggtgtctccttattgtcaatatttctaatgtggcaggttacgtagaatgcccaacctgcattcttataagattgtggatttaattctatagatgtttcgatataattacttttatttatataataactctccttataatccgttacgttcagtgacgctactgtagaagaatatctaccattatcaaactgttttttcttcaattcaattggcgaatcatcctttatctgactaatgtatatttcattttctgttatcatcacaatataatctacgccatgagaggccgccaactgtccacacctactatttacttgattaatactttctttaaagatactaagattaagggagttgacggaatttaactcttctacatccacattagttatatacgataatacagaattgcgtttattagaattgatataatattcatgcgtagttttatttatatcaacaaattcatttaacaccgcagcatcttgctggtagttgcgacttgcgggagttggaacactaagattatctttacaactctgaaaagataaagataataagacaattgctaaaaatagaatagacttcatagttaatagttttttgtgtgtacgaacaataaattttcaaatataagaaactatctttagtgtatgcaatctattgaaagaaaagaagttaatattaaaaagaattatactaccacaatgatttcaccttccacttttacatccatttagagttttatccaatatccaaaatatatttatgataaagatattctatccttcttgtttcgtatgtgtcaattcattcttaccctcaagtacaaacattgccaatatataataggcataaagggagggatactccttttatgcctatagaatggaaaaatctttttattttctaaaaggtggcttcaccactattgccttcaatttacgtccacgcatatcaatacagatctccgtacctgccttggcatattccggtttcacatatcccatgccaataccaatcttgcgagtgggagacattgtaccggaagtcaccactcctataccttctccttccacattcaccaattcatagccgtgacgaggaatgcctcggtcaatcatttcaaaaccaactagtttacgggtagttccttctgccttctgcctttccaacatcggacggttgatgaactccttaccttccacaaacttagtgatccatcccaatccagcttcgatcggtgaagtcttatcatccagatcattgccataaaggcaaaatcccatttccagacgaagcgtatcacgggcacccagccctaccggcttgataccgaattcttcccccgcctcaaatacagctttccataccgcctcggcagcatccggatagaaataaagttcaaaacctccggcaccggtgtatccggtattggagataatcacattctcttttcccgcaaaccggccaacggtaaatgtataataaggaatagccgacagatcaatatccgtcaacttctgcaaagcaagaatagccttcggaccctgaacagcaagctgcgccatattatcggaagaattctccagttccgccccctccgtattatgagaaacacaccagtcccaatccttttctatattggccgcattcactaccagcagatatttttccggctcatagcaatataccagcaagtcatctacaattcccccttcttcattagggaagcaggtatattgtatcttaccgggaacaagtgccgccacattattggaagtcaccttctgaagaaaggctaacgcttgcggccctttcacccagaattctcccatatgggatacatcaaataccccgactgcattacaaacagtcaaatgttcatcaataattccagagtactcgataggcatattatagcctgcaaattcgtgcattttagcacctaatgcaatgtgtttctctgtaaacggagtggttttcattttttgtgtattaagttttaagtaataaattgatattcgtggaatgtaatcacttagaagctactagttcggcaatcttcacaatgacgttcattgccttctccatattctgaataggaacaaactcataacgtccgtggaaattaagaccgccggcaaaaatattcgggcagggtaaacctttgaatgatagctgcgctccatccgtaccgccacgaatcggcttcacattcggcttcactcctaccgcctccatggctgcaaaagctgtgtcgatgatatgcatcaccggttctattttctcacgcatattatagtattggtcacgtaactctagtgtcgccgtaccttctccatattcggtgttgatctccgcaaccagacgttttatttcttccttgcgtttctcaaacttggcacggtcatggtcgcgaatgatataagacactgtactttgctccacatctccctgaatactgatcagatgatagaatccttcatacccttcagtctgctccggtgtttccatcgatggcaacattgcgataaactgattagcgacacgaatcgagtttatcatcttattctttgcatatccggggtgtacattacgtcctttaaaagtaatctttgcagcggcagcattgaaattttcaaactccagttcccctacttcaccaccatccatcgtatacgcccattcgcagccaaacttcccgacatcgaacttatgcgcaccttcaccgatttcctcatccggattgaaaccgatacgaatctttccatgtttgatttcgggatgttctttcagataaacgattgctgatacgatctcggcaattcccgctttatcatccgcaccaagcagcgtcttgccgtttgttacaatcaaatcctctcctttatgatcgagcagttccggaaattgtgcaggagaaagaatgatattttcttcggcacaaagcactatatccgtcccatcgtagccttttacaatacgtggagttacatcttttcctgtcatatcgggacttgtatccatatgagcgataaacccgatagtgggtacttttttatctatattagcaggaagcgtggcaaaaagatagccatgttcatccaaagtaatatcttccaaccccaaagattccagttcagtcttcagatattcagcgaataccatctgtttcggagtactgggagtaagccctgttgattcatccgactgtgtatcaaagctcacatacttcaaaaatctgtctactaaagtcatatctattttacgatttaatgatttgcaatttacattttgatagtttatagtgccgtaaaggtaaaaaaagagccgtgaattgacaaacaattcacggctcttttttctcagtatattacttaaaagtgactgctaccatcaaaacaatgcgtacacactttacatttcggcagcccgatagcttcaatcaaagtctcaagcgtgttgaatttcaatgaagtcagtccgaaacgctcggctatgatactaaccattttctcgtattcgggagaccccgtagtggcgtatttctccagattcttattctcatcgccttccagttctttaataatacgacgagtaatcaactccaaagcattcttagaagccgagaaacccacaaacggacaggcatagatcaacggagggcaagcgatacgcatatgtacctctttcgctccataatcatatagaatcttcacattatcacgcaactgtgttccacgcacaatcgaatcatcacaaaacagcagacgctttccctgaagcatggcacgattcggaattagcttcatctttgcaaccagcgaacgcatttcctgattgctgggtgtgaagctacgaggccatgtcggtgtatattttgaaatggcacgatgataaggaactcctttaccttccgcataacccaacgccatacctactcccgaatcagggataccacaggcacaatccacttccgattcgtccttctgtcccatcttcattccactggtgaaacggacttcctctacatttttgccctcataacaagaggtcgggaaaccataatacacccaaaggaaagaacaaatctgcattccttcattcggttggcgaagctgctcgatatgatcgggatacatgcgtactatttcccccggtcccagatacttttcgatttcataatccagattcgggaaactggatgactcgctggtagcggcatacgcaccatctttcttgccgatcaccaccggagtacgtccccattggtcacgagccgcgataatactgccatcctctgtcagaatcagcagagaacaagaacccttgatatgtttgaatacgttctcgataccttcggtgaaggttcttccttgtatgataagcagtgcgatgagttccgtttgattggtgttgctcgaactaagttcggcgaagtgcatattttggttgagaaggtcttcttccagttcctggatattcgatattttagcgactgtgacgatggcgaagcggccgaggtgggaattgatgataatgggttgtgcatctgtgtcgctgataatgcctatgccggcattgcctttaaatttatcaagctctccttcaaacttggatcggaaatatgtactttccagattgtgaatggagcgaataaatcctttctcctgactataagtcgcgagtccgccccgctttgtacccagatgtgagttataatctgtaccatagaataaatcagtcacgcaactcgatttcgagactgttccgaaaaaacctcccatgttgttctctttattgataatgtttaaaaaaagatggcgcaaaagtacaaaaaagaatccatccgataaaaaaagcactccgcaaagttttaattttctttgcggagtacttctaaattttattaaaaatacaaagaagattgaacaatcgtttagtcgcgtctcatttccatttcttaattgatttccggtcggatggagctgcttcgataagactcaatgcaaaaccaccgctgcgtgccagcttgacggacatctttgttttattcgtaacgatccctttctttatctgataggaagtcggattcttttcgtagtcagcctcttttccgtcggcatacagggtagccacatactctttatccggttccagaaaatcaagagtaaacgcggcagtacgggagttttcgtcagtaataccgccaacaaaccaatgattggttccttttgctttgcgggctactgtaatataatcccccggttcggcttccagatatttgctgtcatcccagtccaaggctacatctttaataaactggaaagcatccggataacgctcataactttccggcaaatcggcagccatctgcaaaggactgtacattgttacgtaaagagccagttgtttcgccagagtagtacgtacaacgctatgcttcccatccagaaaagaaattctcgtgtcgaagatacccggtgtataatccatcgggccgccgatctgccgagtgaatggaagcaaagtagtatgaaaaggtttattaccggcaaaagcttcatattccgtcccccgtgccgattcattgccgatcaggttgggataagtacggcataatccagtaggacgtacagcttcgtgcgcattcacacagattttataatcggcggctttcgtcacggcatatagataatggttgttcatccattgtccatagtgatgttcgccccgaggaatgatattgccaacataaccacttttcacggcattatatccgttgtcaaccataaattggtaggccgtatccagatggcgttcgtagttacgcacggaggcagatgtttcatgatgcatcatcagcttcacccctttctctttggcatatgcgtttagcatcttcacgtcgaaatccggatagggagtgacgaaatcaaacacataatcttttgatttgccgaaccaatcttcccagccttcattccagccttctaccaatacctgatcgaaaccatgctgcgctgcaaagtcgatataacgttttactttgtcattgttggcagcgtgacgtccgttagggcttgtctttgagtaatccgtctgtccgagtttgacggaataaacatcatctgtatatgcccaactgctttttccggtaatcatctcccaccacacaccgatatacttcaccggtttaatccaagaaacatcttgataagcacatggttcgttcagattcaaggtcagtttggaagcaaggatatcgcgtgcatcatcgctcacaatcaccgtacgccacggagactgacagggtgtctgcatataacctttatctcccattgcatccggtgtcagccatgattcaaaaatcagttttttgtcatcaagattgagatgcatgcaggaataatctaccaaagcggcttcgtgcaggttaatatacagaccgtcggctgttttcatttgcagagatgtctgcacgcctgttggtgaaaaagacgtttgagaagcattgtcggtaatagcccctttcatcagtccacggatttctgttagtctggattctgtgtaatcatattcctgggtatcataatctcccggaatccaaaaggcagtatggtcacccgtcatggcaaactgcgaatgttcttccttaataacaaaataattcagattcttctgctgcggaaattcatagcggaaacctaatccatcattgtaaagccggaaacggatgatcatattccggtcctgcgccttctgattcagtgtgacagccatttcattataatgattgcgaatggatttcacttctccccacaccggctcccaagtttcgtcgaaggtggaagtttttgtatcgatgcacgcaaacccattcatcagtcccggatcattcttcaactcaagtcccaactttgatggtttaatcactccctttcctttataagtaagttcgtataccggttctccctgaacattgaccgaaaaatccagttttaattgtccgtcaggagaagtgatactttctgccattgccgttgcacccatagaaaaagagagtaacagacagagtactgccgtagttaatattttcatgttcttcatgatataaatgaattagttaataatcatatggcaaatgtagtgaggaatagcaagcgccacttcggattataattaaaatatagcgtttccgaatgtttcaacactgataaatacctatcaataaagcatataccaaagtacttcaacagaaaaaatatagtgcttacatggagcaatatagcaccttttcacatccgacaaacgggatttttctttatttccccgcctctcttcagaaataaaaaaaatattttaatctcatactctcatcctatgacaactaatatatagacaatcagcacaatacagaatgagagatactttttaaatagttatctctcatcatttcctcatcaaatagctttctttttgactacctctcattcatatttcagttatctctcattcgtctcaaagccgataatccattgtactatggcaagccttacagaacatggaacctaccgctactttgtatataacatatagtatgtgggtatgtatatcatctattaatactgtatttttgaagggatattaccatcgttccactccagtgcacagatctcatcactcttgtgaagagttctcatcactagagtgaacagacctgttcactctagtggaacgataaagatgaaaggtagaaaagatacaaatataagcaggatatcatagaaaagacagtcagataaaacactaacaaccgcccaatgacaaggaatacaatatagttcaaaatacaatatccgcatgggttcggattgaattatcctaaaatttacatctaatctgaataccagagacaaaaaagttcaaagtatgctatgatattagcatataattgataaatttgcaagcaaaatatcttactttataacacataatctaatattactattatgacacagcacttcagatatacgacattggtacttcttacaacattatctaccgtttatgcctccgcacagtctctgcgaaaattaatggaaatgcctccgcgcattattgaatcgaaatgggagcaaactccggaaggaggaacagaattaaactattacaacggagacctgtgcagttactaccttttccgcgaaaatgatcgttcatacaatttgaaccccggaaagaacacggtattcagaatagagaaaggctccaatgccagcaattctttcaagacttcaagcaggtatatgttcttccgcggtcaattccccaaagactttcagatcagtactccttatgcacttcctgtaaagaccggcgaagaaacacaatggcagatcgctcctcaggaatctgccaaaactatgatattccaaattcaggaaggagacaccgtctatgcaacccgcagaggagtcgcctgtgcgacagtgctgccacagcaattgttgatataccaccccgaccatacctttgccgcttaccttatgatgcgtcaaaacttcatccagacgggtgaagaagtcatgaccgggcaacccattgggatagccggagtactcggagtatccatctcttatttttttcttgataacaataaattcgatgcaaacggcttcttaggttatccatattctcactttactcctgtattccgcacggacaagggggatgtaaaactggaggagaaaacagcctataaatctgccacagatgatgaactgattatgctcgaaatgagcaaacgtgaaaaaaagaaatttcagaagcagaaatactcaaaataaagggaaacaatatgcgtatattttatcttatcctctgtttcatctgcctttgcgacctgctccatgcgcagactgtaagaatctcttatgaaggcgacccgcttacggacaaagaacgccggaagattgaacagaccctccaatatgaagtcgaattttatgcacaattcggacttcccgatacgcttaatcttcaattgactgtattcaacaaaagggaagatgcgctggtctatctgaacaaattcaatatacatcctcccaaaagtacaaacggaatgtatatatccagattacaaaaggccatcatattaagcagagaaaaagaataccaacaaggtctgggcgtcatctatcacgaactgagccatcacctcaccttgcaaatcacggcaggacgtcctccgatatggttcaacgagggacttgccgaatattttgagcattgtaaagttaataaaaaaggacttcagcacacgtttaccgattacgaaaaaggaagaatccgcactatatatatgttgggggacattgatctgctcacctttatcaacagccgccaaaaggaatttatgaagcagcaaagaaccgacgaacaatacgcctatatcctctctcatgcactcgtcactttctggatcgagaaagttccccggcagatattacgtgattttgtactctcctttcaaaacaaagatgactcatccattgtttccgaacggatagataaggtttacaccggagggttcaaacaatttgaaaaagattttgaagccttctgcaaatagttttatcttttttctatctttgcaccggctatgggattagcctttaaccgcccttcggagctgatgatccctacaatttgaatgtataactcttaaattgtcagcttatgctcaagactttactctttatcggtatgggaagttttaccggaggcgttctgcgttatctcatctcgcgttacgttcagaatttcttgacaccttccttccctttgggaacacttctggtcaatgtactcggttgtttcgccatcggcctgttttacggactcttcgaacggggaaatctgatgaaccccaatctgagaatgtttctcaccgtaggattctgtggaggattcaccaccttttcaaccttcatgaatgagaactttcagttaatcaaagacgataatttcttctacctctcactctatgtaggcctcagcttgtttgtaggattcattatgctgtacttgggatattcacttgtaaaacaataaacataacatatctacatcatatgatcaaaagaaatgcagccaagcccgtccgtgtggctcctcccatgatggaggaacaggaagtcagtacaagcaccttgcaagaactgctcgaaaaagaggaaaccgtctcaaatctcatattcagcaaaggaagagaagagggaatcagcaagtcttacaagagtttcaagaactgcactttccggaatcagacattcagcgaatgtaaattccgttcttctcagctggcagatatacggttcgagaactgcgacctgtccaatatatcttttgcagaaagctccctttaccgggtagagttcattgcctgcaaattactaggaaccaacctttcagagacgaccatgaatcatgttttattgcatgactgtaatgcctcttacatcaatctggcgatgagcaaaatgaatcaggtacgcttctcgcactgccatttccggaacggaagtttcaatgactgccgtttctcttccgtcgccttcgacagttgtgatttggtagaagctgacttttctcatgctccgctccgtggaatcgacctgcgtacttcgcgcatcggcggaataacacttaatatcagcgacctgaaaggagctgtcattacttccttgcaggccatggacttgcttccgctgttgggagttattatcgaagactagaattctaccaatttcatccatccgcattcaaacaaaaagcatcgtcacattgttatttaataagaccggactaatgacatctagggagtatgattcgaaagaatacctatttatagtgattttccactctctgtcaagtccgtacttttgcaaaaatattattcaaaacaatagaaacgatgaaaatagaaaaaattgtagctcgagaaattctcgattcaagaggtaaccccacagtagaagttgacgtagtattggaatcaggtatcatgggacgtgcgtctgttccgtcaggtgcttccacaggtgaacatgaagcactcgaacttcgtgatggtgacaagcaacgttacggtggcaaaggcgtacaaaaggcggtggacaatgtaaacaagatcattgctccgaaactgatcggtatgtcttctctcaaccaaagaggaatcgactacgcaatgttggcactcgacggtactaaaaccaagtccaatctaggtgctaacgctattcttggcgtatctctcgctgtagccaaagcagcagccagctatcttgatctccctctctatcgctatatcggcggaacaaatacatacgtaatgcctgtaccgatgatgaatatcatcaatggcggttcacacagtgacgctcctatcgcattccaggaattcatgattcgtccggtaggtgcaccctcattcagagaaggtttgagaatgggcgccgaagtattccacgctttgaagaaagtactgaaagatcgtggcctcagcactgccgtaggcgacgaaggtggtttcgctcctaacctcgaaggtacggaagatgctctgaactctatcatcgcagccatcaaagctgccggatacgaaccaggtaaagacgtaatgatcggtatggactgcgcttcttccgaattctaccatgacggtatctacgactataccaagtttgaaggtgccaaaggcaagaaacgtaccgccgaagaacagatcgactacctggaagaactgatcaacaaattcccaatcgactccatcgaagacggtatgagcgaaaacgactgggaaggctggaagaaactgactgaacgtatcggcgaccgctgccagttggtaggtgatgacctgttcgttacgaacgttgacttcctcgcaatgggtatcgagaagggatgtgcaaactctatcctgatcaaagtaaaccaaatcggttcgctgaccgaaactctgaacgctatcgaaatggctcaccgtcatggctatacgactgtcacttcccaccgctccggcgaaacggaagacgcaacgattgcagacatcgcagtagctacgaatagcggacagatcaagaccggttcattaagccgttcggaccgtatggctaaatataaccaactgctccgcatcgaagaagaactcggtgacttggctgtatacggatataagagaatcaaataatctttattctcttttcagatatctttcccccgggcaatgtgttgtccggggatttttttatatatttgatgacttacaaacgacctgaagcattttgctacgtatcatatagtaaacaggaataaataatgatgaatcaggaaaaaatacaggaactggtcagccgaagtcagcaggacgacaaaagggccttcgccctactggtttcagaattccagccactggtattccgactagctttccgtttactttgtgatgaagaggaagccagagacataacacaagaaacatttgtaaaagtatggttatccctgaaaacgtacaatcaggaaaaccgcctgtcaacctggctttacaaaatcacctgtaacacctgttacgaccgtttgcgttcgttacgccattctccgctggataatgaatccgccttttccgattcggtaaatattccttctgacgatcatattgagatatctctttccaacaagcagttgaaagaactgatattgcgatataccaacgaactgcctccccagcagaaactcgttttcacgcttcgggatgtcgaagagttggaggtagcagaagtacagattatcacaggattatcgcccgaaaagataaaaagtaccttgtaccttgccagaaagaacatacgtaataaaatgaatcaaatagatcccgacttatgaaacaagaagataaacagtatgaaaaatggctgaccgaagtcaaaagtaaccagccgatattggaaaatccggaggaactgaccgctaccatcctcaacagaatatccgggatctcaccggaaaggaaacggagaaagtttctcataggagcatgggcatccggcattgccgcctcattattactcctgctattcatcaatgacacttgcttcacttctgtccctcaccggacagaaatgcaaaatgaatatgataactggtcaaacagcattccattacctgacaactgggaagaaatgcgactgctggaaaagaacacttatctatcctctcaatatacgcaacaccggaaatcccggaagatgcaaatcttacaagtcatcaaaaaaaaacgattaaaatagacagaatatgaaaaccaactatttcttaataaccatgctactgttacttagcatgacttcttgcagcacctattatcggatgacttcacgggttgaaagggacggaagtatgtacagagaaatctatgcacaaggtgattccgctttcatcgcaggagataagacacataatccatttctgtttcaaccgaatgccaactggcaattagtaaatctagactctacaattaaattcaacttctggggcgaagaagaaaagctgaatgtaaaagcctgccaaaaactctccggagtagatggagaatacttcactgttgacaaaggtaaagagcatctgagtgccatggctatacctatggaacgggtaaagaagagtttcagatggttctatacctattatatatataccgccacttacaaagaacttcaggacaaaggtcctgtacctcttgacaattatctgaataaggaagagcaaatgatttggcttcatggaaacgatgatgccttcagaggcatgaacggcatcgaaatgaatgataaactggataaactcgaagctaaattcggagaatggtataaccgcaatgtctatgagatcaattgggaagtcatccgccacttcacttctttacaaggagataccgcttgcctgcagtgtctggaggaattgaaagattctgtctacaagaaacattcgtcagaaaaaggcgacagtatgggagacgctgatatcgaggaggtctgcggtatgtttgataaagcttgcagtacgaaatacttttcggacctttataaaacaaataaagaaatgatggatgccctgtgcgaagagaaaatcaacatcgccgaagtcttctatcatgctatacaatttgagttgacactgccgggcagactgctcacctctaacgccaaagttctgaaagataatgtagtcatttggaaaatagacggcttccggcttctcgctggtgattatatacttaccgcagagtcacgggtcattaattactgggcattcgggattactttattcatgatgctgtttgtcttaggaattttcatcaaattatacaggaggagatcataaaagcagtaacaaatagcatcgtcgttttcagactcttgcagcagtcctcaaccggatgattgataatcatactgtatagcagataagccttttcgtttcatcaagtaaatcattccattcatcagattaatttgagtacgcgaaaccatcagggtaattttgaggtcagaaatcaattaaactatttaaatgatgaagactcttaaaatctatttcctgcttatgctgctgattcagacaatcagcatatccgcacagtcagtcatatcgggtaaaataaccaataacgacagttcacccatagtcggcgcgacaatattgttatcaaacggtatggactctacctatataacagggacgacctccgacttggacggacgatttaaaatgataaatgtcaaatcgggcaattactttctttccttgtcaatgatcggatataagaaagcaaatatccccctgcagatcaaggaaagcatgaatctggaattgggtgacattacactggaagaagattcttatatattgtctactgtaaatataatcggcaagcgccctccaatcaaggccgaaccgggaaagatgacagtcaacttatcatctgccctattgagtacggacggtaatatactggatgcactgagaaaactaccgggagtaatcgttcagaatgacggaacaattattcttaatggcaaatcaggggcgaatgttttaatggatgataaagtgacctatttatcgggagagaacctcatcaattacctgcgctccatccctgccagttctattgaaaatatagaactgatatcccagccatcatcaaaacacgatgcttcaggcagttcgggcatcattaacattcaaaaaaagaaaatcaaagaacaaggtataagccttacagcttcctccggtctggaacaaggaaaacatactaaagggaatgaaaacctgactctgaactttcaccacaataaattgaatatgtatgccgactattcttattattggggaaaagattttatagaactatcggtttccggtcattacctggatccgatgactttaaaacctcttgaactgagaaaagattttgatagtgatataaaccggcaatacaaagggcattatatcaaaacaggggtcgattatgacttgtcggagaagatagccatcggaacatacttctcatcaagctggctcaataggaacaaacaagaagtgactgtatctgacttttttaataacgacaagactcaaagcgactcaaccttaacagcgttaagcacaccggactatagctacaccaatatcatagggggagcgaacatgatatacaaatttgcgaaaacaggaaaatgggatgcttcttttgattatcagctttttaatcaagaggataaccatctgctgaaatccttttttcagacaggtattcatccggtaaaaggagacacattgtccggtataaccaatggggacattaaaatatacagcggacaaactaatttgagctatgatatctctgacaagttcggaataaccaccgggctcaaatcggttttcgtacatataagcagtgatgccttatacaaaaacctgattgccggtgattggagagaagacagtgatctcagcagtagttttgcttatcatgagaatatctacgcagggtatcttcagctaaacgctaaatggtctgccagattttcaacagaaataggcttacgattagaaagtacatatacaaaaagcaattataattcagccgttcaggactcggtattcaaccaaagctatgtacacctcttccctactttgatggttcaatatcagctttccgaaaatcataatttgtctatggcatacagccgtcgcatcgtccgccccaattacagaaatatgaatcctttcgttgaggtcagagaccagtttttatatgaacaaggaaataccgaattaagaccagaactaatagataatatagaaatctcatggctactcaaaaaacgatattcattcaatgtattctactctcacaggagtgatcctatctcgttaagttttttagtcgaagataataaccgtgtcttactaatgccgcaaaatttatcaggcaataactcattcggagtaagagccggcttgaataacctaaaaccattccaatggtggacatcccatataaacggatctttaacttataagaaattcagttgggcaacacttgggaaaacactaaaaaatgaagtgacaacacccatgctacatatcagcaatcaatttacattaccatacggctgggatgcggaagccctcggattttatagtggagaaatgattgaaggacagaccagagtgaaacctttatggacaatatctctcggagtccgcaaaaacctgtgcaataacaaatttagtttgtatatttacgcacatgatatatttcattcgaaccgcccccatgtaagtatggagactaactatctgtattacgcgtctcaggaaaaaaacgacagcagaatgataggcatatcgctcagttatcgtttcaatcgaggcaaagagattaagaaatctcagaatgaaaacagaatagaagaaagtaaacggataggtttgtagtatcaaagattaaaatagcaactaatgaacttaaagtacgaatggattaacaccctatttataatactgccactttccttgtgcgtatttattattgtagatatcgcttataatgagcgaatatgggaactggatacttttgccgtaaaagcacgtttacaggcattgggcatcactgttgcttacttctatcttttaaactatatttttaagcgggtagcccgcttctttatcgacaaaagcaaagatgagaagaaagcaaactggaaagaatacgtatgggtgtttctgataaacttcgtcttcctaaatatcatgcatacattcattatgttttgcataacgatggccgggactttcaaatggggcgaatcggcattgatcaatgtgacaggagctctcctggcgtttctatattatataatgatacgcaatagaattttattcaagagtcttatcgagcaaagccttcaattagaaaaagtaaaagtcgaccaactggagaccgaacttaaatttctgaaatcccaatatcatccgcatttcctgttcaatgctttaaataccatctattttcaagtggatgagaataacaaagtagccaaacaaagtatcgagcagctctccgacctgttgcgatatcagctttatgatatagaaaaggaagtgacgatggaacaggaaataaattacctgagatcatatattgcctttcagcaattgcggatgagcgaaaggcttatgttggatttatatttcgacccgcaactaaaagagcaaaaaatacatcctttattacttcagccactgatcgagaatgctttcaaatacgtaagaggagattacaaaataaaactggaaatcaaagttgacggaaaccagattcagtctgagataaaaaattcaatatcctcctccccatctactgccaacaaaaaagagaaagggataggcattgagaatttaaaacgccggcttgaccttctgtatcctgaaaaatacagcttagacttcaaacaaacagaccatatgtttatcgctaaattaaccataaacactgattgatatgaaaataaaatgtatcattacagatgatgaacctatagcaagaaaaggcttgcgagggtatatcgaaaaagtagatttcctcaccttgaccggagagtgtgaagatgccgtccaactaaatacaatactgaagacccaagaaatagaccttctgtttcttgatatcgaaatgcccgaaatgacaggtatagaactgttgtctaatctaacaaatccgcccaaagttattattgtatcagcttatgaacaatacgccctaaaaggatatgagtttaatgtagtggattatcttttaaaacctgtatctttcgatcgttttatcaaatctgtcaacaaaatctacgatttgttacaaacggagcaaaaagaaaagaatgattatatatttgtgaagagcaacaaactattaaaaaagattctgttcaaggatattctctacattgaaagcatggaaaactatgttgtcattcagacagtctcatgcaaggaagtagtgtatactactctgaaacaactcaatgattcattgccgaaggatgtttttcaacagactcaccgctcatatattgtgaatcttgaaaaggttactgctattgacggcaatcagctgaccctctcctcttacaaaataccagtagcccggaccttcagagacagtatcttcaacctgatactgaataaccggctaataatcaaaagctaaaccggagcgacacaggatataaaagaaaaagcatccaagtaaaatacctgaatgcttttttctttctgagcctcttgtcggattcgaaccaacgaccccgagattacaaatcacgtgctctggccaactgagctaaagaggcgggtgggtaagcttactatatcgcgccgctacaaccaactacctttgctgcgatcaagccctggaggattcgaagggagctggccgtataggacttacccgttttgcggttgcaaaggtaggcatttttatggattctgcaatagctgtaggtaacttttttgcataaaaggaagtaatactctacgtttcaagcaattaaaaatcaaaaaaaatattcgagtgccaacttttactgctttattaactttaacaaccatattccctttaccaaccgatattatttgtacctttgtgcgcaatttattaacgaagatgacagagaacagaagctatttacagaaatatgccatgcactttggcacgtatatgggaatctattggatattgaagttcattttatttccgttgggatttcacatccctttcctttcactattatttgtaatcctgacgttggcagtgccgttcattggctatcactacgtgaagatgtatcgtgacaaaatatgtggaggaagtatccaattctctcatgcggttctctttaccatattcatgtatatgtttgcttccctgctggtagccgttgcacactacgcctatttccagttcattgaccacggctttatcatcaactcctatatccagctatgggacgaactgatgactaaaacacctgccttgatggaaaatcaagagataataaaagaaacgatagatactgcccgttcacttacttccatcaatatcaccatgcaactcctgtcatgggatgtattctggggaagtttactggccattcctaccggattgatggtaatgaagaaagcacgaccggaaaacaataccccggcccaatcataattcgtaattcataattattaaaaatgaatatatcagttgtagtcccattattcaatgaagaagagtcactgcccgaactctacgcttggatagaacgggtaatgaaagccaacggattctcattcgaagtgattttcgttaacgacggaagtacagaccgttcatgggaggtaatagaaaaactcaaagcccaatcggactgcgtaaaaggcatcaagttccgccgcaattacggtaaatcgccagcactctactgcggatttgcagaagcacaaggagatgtggtgatcacaatggatgccgacttacaggacagccccgacgaaataccggaattataccggatgattacggaagacggatatgatcttgtgtccggatggaagcaaaaaagatatgatccgctatcaaagacactgccgacaaagttattcaatgctaccgcacgcaaagtatcaggtattccaaacctgcacgacttcaactgcggtctgaaagcctatcgcaaagatgtcgtgaaaaatatcgaagtatatggcgaaatgcatcgctatatcccctaccttgcaaagaatgccggattccagaagataggtgaaaaggtggtacaccaccaggcacgtaaatatggctctaccaaattcggattcaaccgtttcttcaacggatatctggatttgatttctctttggttcctgtctaaattcggagtgaagccgatgcatttcttcggattattaggatcgcttatgttctttatcggaatgatctccgttatcatggtaggtgtcagcaaactgcatgcaatgtacaacggtctcccctaccggcttgtaaccgattctccttatttctatctatcgctcacagcgatgattatcggtacacagttattccttgccggattcctgggagaactgatctcacgtaatgcccccgaacggaacaattatcagatagaaaagaaaatttaattcacgcccaataaccgattatgaagaatttaattcgtatctttttaatagtagtaattgttggtgcaagtataagcatcggcagttcgtgttcggacgaaaacgattgttcgctggcgggacgccccatgatgtactgcacattgtacacaattgacgaaataaccgacagaagagtaaacgacacactggactcattaacaattacagcattgggaacagactcgatcattctcaacaaccaaaaaaaagtacatacactgatgctaccgttacgctataccagcgatacaactgtatttatactctggtacaatccgaatagtcctactaacaaaaaagatgttgatacattatatattatacaaaaaaacacaccgtattttcaatcaatggaatgcggatatatgatgaagcagaacattctcagtaccaaatttggaaataccaaaaatagttcggaaagaatagattctctacatatacaaaataaagaagccaatacaaatgaaattgagaatttacaaatattctatagatatcgcgaccgcacgcctcctacgattgagtagtgtgctactcctcttttgtattggaatcccgacaattgctcaacaacaacgaccgactcccgtacaaaaaagagaccagaagaagaaagagactgtagtcgataccatcccgttttataatgggacgtatgtcggtgtggacatatacggcatcggaagtaaaatgctaggtggcgacttcatgagttccgaagtcagcataggcgtcaaccttaaaaacaagtttatcccgaccatcgagtttggtatgggaggaacagatacatggaatgaaacgggaatacactacaaaagtaagaccgccccattcttccggattggtgtagactataatacgatggcaaagaaaaaggagaaaaacagctatctatatgtaggtctccgctatgcgttcagttcattcaagtatgatgtatcgaccctgccggttgacgatccgatttggggaggaagtatcggaaatccgagtctggaagacgactactggggaggaagcgttcctttcagtcatttagggatgaaagggtctatgcagtggtttgaattagtggtaggtgtcaaagtacgcatttacaagaatttcaatatgggctggtctgtacgcatgaaatataagacaaatgcttcgaccaatgaatacgccaacccttggtatgtgcccggctacggaaaatttaaatcaaataacatgggaattacctattccctcatttacaaattacctctttaaagaataatgacaggactagagatttggctgcttgcaataggcttagcgatggattgtttcgctgtttcaattgcaagcggtattattttgaaacgtactcaatggagaccgatgctggtcatggctttggcgttcggactttttcaggctctgatgccattcattggatggatgtttgcaaagactttcagccacctgatagaaagtgtagaccactggatcgccttcgctatccttgccttcttgggcggacgtatgattcttgaatcttttaaagacgaggactgccgtcagacatttaaccccgcaagtccgaaagtcgtattcacaatggcgatagcgacaagtatcgatgcactggcaataggcatctcctttgccctgctcggaatcaacaactataccgaaatcctctctcctatccttatcatcggattcgtatcattcgtcatgtcgctcattggcctttacttcggtatcaaatgtggttgtggatgtgcacggaaattaaaggcggaattatggggcggcatcattctggtcgctatcggattaaaaatattgatagaacatctattcttacaataataagcattggttcctctaataaaaaaaacagaaaaacgtatgaaaacaaaaaagagtttcctttggctggccttcctcatcttggcaacgatctggatattagccagacgtaaccaaaaagcagagtttaataccgccagtggttttgtgtttgggacagtatacaagatcgcgtatcaacatgacgctgatctgaaaccggagattgaagcggaattaaaacgtttcgaccagtctctctcaccgttcaatgacagttcggtcattagtcgcgtcaatcgcaacgaagagttggtgacagacagctttttccaaacttgcttcaaccgttctatggaaatctcccgtgaaacaaaaggagcttttgacataacgatagcccctcttgccaatgcctggggatttggctttaagaaaggcgccttccctgattcattgatgatagacagcctgctacagattaccggttacgaaaaagtgaagctggaaaacggaaaggtagtcaagcaagatccgcgtgtaatgttaagttgcagtgcggttgcaaaaggctattcggtagatgtaatagcccgtctactcgatcggaaaggaatcaaaaactatatggtagatataggtggtgaagtagtagtaaaaggtaaaaatgcgacaggagatctgtggcgtatcggaataaacaagccgtacgacgactcattagctgttaagcaagatatacaagtagtactcaacctgacagatttaggtatggctacttcgggaaactaccgcaactattattataaggatggcaaaaagtatgctcataccatcgaccccagaacaggttatccggtacagcacagtatcctatcttctactgtgattgccgaagactgtatgacggctgatgctttggctacctctttcatggtaatggaactggaagaagccgaaaaattctgtaaagcaaatcctatgatcgatgcctactttatatatagcggcgagaatggagagtttaagacttactatacggatggtatgaaacgatatatgcctgatgccaaatagaaaaatgctttgcaaataagcatataaacggaggctccatttcatacgaatagagcctccgtttatataaaacagcacctctgttgaagccaaacgaagcctctgtttcagagtggctgaaacaattatttcataaacacaaaataaacagctgcaatcaggcaaacaaatgctgccagatggttccagtgcaatgtttctcccttaaagaaaacagtggtaaaaacagtaaatataatcaaagtaatcacctcttgaatcactttcaactgcatcagcgagaatggaccgccattcccgacaaagccgatacgattcgccggtatttgacaagaatattcaaaaaatgcaataacccaactaaaggtaatcacacctatcaacggaagagcagcaaaccaagaatactcttgtttcatctttaaatgcccataccatgcaaaggtcataaagacattggatacaatgagtaataaaattgtatagaaacctttcatcttattatatactaaaattagtaattatcagtctattttatccggcaacaattcttcctgcacattcgtcatgctcccccacaagctgtagcgagcttccggattcatcgcttccaactgtcgcagaatacccttcatatcacttcggctggactgtgattcataaggacaattcttcacttgtttccggtagtcatgcaatgcagccagttcaatcagatcagcctcgtgcaccatacacatcggtcggataattgtcatatcaaatttcttcatcaccaagcgaggcggcatcgtactgaatgccccctgataagtaatgttcatcaacaatgtttccaaaatatcatccatgtgatgtcctaaagcaatcttattgcatccttgctccttggcaaccgtaaacagagctttccgacgattccaggaacaaagaaagcagggagacttgcgcgtatccgtagcaggatcaaaggacgtttcgtactgcacaaaaggcactccaaaagagtcacaatatgctttcagatattcagtatcactttggtaaggaatattattcatcaccacatgaacagctatcacagaaaaccgaggcttataaatacgcgcccgcttgcccagcaactctacaagtgccaacgaatctttcccgcccgacagtccgataaggattttgtccccttcttctatcagtccatactgcaccactcctttattgaatcgccgttcaatacggcggatcgtcttctcttcttccgtaaattgtgtcatatcttcaaaaatcggctgcaaaagtaagcgaaaagaatgatttaaagaagaattaacataatagaatctctgaaaaagggtttatttctaataaatttgtacttttgaacaattgatgcatggattagtgaataaaacaatgaaaagaaaatatattctatttttaatttgcagtttcttccttggaggagcatctgcacaaacattggaacaggcacgcaccttatttacaaaaggtgactacgaacaagccaaacccgtatttcagaaatatgccaaatctcaaccatccaatggtaactacagctattggtacggtgtctgctgcctgaaaaccggagaaccggaagaagccgtgaagtatctcgaaaccgctgtaaaaagacgggtagccggtggacaactctatctgggacaagcttacaatgatacttatcgtttcgaagatgcagtcaactgctttgaagaatatatcgccgacctcagcaaacgcaaaagatcgacggaagaagctgaagctctattggaaaagagcaaagctgacctgcgtatgctcaaaggagtagaagacgtgtgcattattgacagtttcgtggtagataaagcaaatttcctgagcgcatacaagatcagtgaagagtctggcaagctatttacattcaacgaattcttccagaccgaaggagatcatccgggaacagtttatgaaacagaaatcggtaataaaatctattatagcgaaaagggagaaagaggaaatctggatatattctccaaaaataaattactgaatgaatggagcaacggtcgcccgttgcccggcagcatcaacgaatccggaaacgccaactacccgtttgttttatcggatggtgttactatttattatgcaaccgatggcgaaggactgggaggatatgatatttttgtcactcgttacaacacaaatacggactcttatctgacgccggaaaatgtgggaatgccgttcaattcaccttataatgattatatgtacgtcatcgacgaatacaataatctgggttggtttgcctccgaccgtttccagcccgaagagaaggtctgcatctatgtgttcattcctaattcgtctaaacagacttataattatgaggcgatggacccgcaacagatgatccgtctggcacagattcattcgctgaaggaaacttggaaagatgaaaatacagtaacggaggcactgcaacgtctgaaagaggcaatcaatcataagccacaggaacgtcgtgtggttgatttcgagtttgtcatcgatgatagcacgacctattatcagttgagtgacttcaaatcacccaaagcaaagctactgttccaaagttaccggcaactggaaaaagattatctgcaacaggaagataaactgaacggtctgcgccagcaatatgcaagcgccaatcaacaaggaaaagaaaaacttgctcccgcaatccttgatctggaaaaaagaattctgcaaatgaatgaagagctggatgctcttggagtaagtgtgcgtaatgccgaaaaaacaaaatcaaaataatacagagttatggacatactgattatcaccgttctcatcattgctgcagtaatactatttttggttgaactgtttgtcattccggggattagcctggctggcatttcagcacttgcttgtattctctatgccaactattacgctttcgccaatctgggtatggcaggaggatttatcactttagggatatcggctgtcgcctgtatcggttcgcttgtctggttcatgcgttcgaagatgctggataagctggctttgaaaaaagatattgactcgaaagtagaccgcagtgcggaaaagagcgtcaaggtaggcgacacaggaatcagcactacccgcctggcacaaatcggttatgctgagattaacggtaacatcgtggaagtaagatcgatagatggcttcctcaatgaaaaaactcccatcattgtgagccgcattactgacggtaccattctggttgagaaacacaaaatataatattcacttaatataaattatcaatggaaacatctttgtacttacctatcgttctgattgttggaggtattattttcctaatactatttttccattatgtgccgttcttcctttggttgtcggctaaagtatcaggcgttaacatctcgttgattcaactcttcctgatgcgtatccgtaatgttccgccgtatatcattgttccgggcatgatcgaagcccacaaagccggattgaagaacatcacccgtgatgaactggaagcccactaccttgccggaggccatgtagaaaaagtagtacatgcgctggtatccgcatcgaaagccaacattgagctgtcattccagatggcaaccgctatcgaccttgccggacgtgatgtgtttgaagctgttcagatgtctgtaaacccgaaagtgattgatactcctcctgttactgcagtagccaaagacggtatccagctgatagcgaaagctcgtgtaacagtacgtgccagcatcaagcagctggtcggtggtgccggagaagataccatccttgcccgtgtaggtgaaggtatcgtttcctctatcggttcttcggaaaaccacaagtcagtactcgaaaatccggattctatctctaaacttgtactccgcaagggattggatgcaggaactgctttcgaaattctgtctattgatatcgcggatatcgatataggtaaaaacattggtgcagctttgcagattgaccaagctaatgcagacaagaatatcgcacaggctaaagcagaagaacgccgtgcaatggctgtcgcttccgaacaggaaatgaaagctaaggcacaggaagcacgcgccaaagtaatcgaagcggaagcggaagtacctaaagcaatggcagaggccttccgtagtggcaatctgggtataatggattattaccgtatgaaaaatatcgaagccgatacttcaatgcgcgaaaacattgccaaaccaacgactggtggtaccaccaaccagcctttgagtaaatagtctaccaaacgccggaacccgattcctattcagttcatctgcgtatcttctctttgacaaacttgcaaaagaaaagaaagatacctcttccgaactaaaatccggttccggcgtttctatttatatatacgacttattgtaaaactaaaaccgttcaataacatgaaaaagtactttccatcctctgaactgattatcaacgaagacggctcggtattccatcttcacgtaaagcccgaatggctggcagataaagtgatccttgtaggagatccaggacgtgtagcactcgtagcttctcactttgaaaacaaagaatgcgaagtggaaagccgcgaattcaaaacaatcacgggtacatataaaggtaaacgaatcacagtggtttctaccggaattggttgcgataatatcgacatcgttatgaacgaactggatgcgcttgccaacatcaactttgagacacgggaagaaaaagaaaagttccgccaactggagttagtacgtatcggtacgtgcggcggcttgcagccaaatactccggtaggcaccttcgtctgttcacagaaatctatcggtttcgacggattattgaatttttatgccggacgtaatgcggtatgcgatcttcctttcgaacgtgctttccttaactacatgggctggtcgggaaatatgtgtgcccctgcgccttatgttattgatgccagtgaagaactgattgaccggattgctaaagaagatatggtacgtggtgtaacgattgccgcaggaggcttctttgggccacaaggacgtgagctccgtattccgttagcagacccgaaacaaaatgataagattgaaacatttgaatataaaggctttaagattaccaacttcgaaatggaaagttcggcacttgcaggacttagccgactgatgggacataaggcaatgaccgtctgtatggtaatagccaaccgactgatcaaagaggctaataccggatataagaatacaatcgatacactgattaagactgtgctcgacagaatataggataatatcaattaccatgaaagaccttcactaaaaccattaataattctttagtgaaggtcttttttattgattcatatatacagtttctaataagagagaggttttagcctttggtgcgatgaggaacaaaggtaaagaatcttttgaagtaatctcttaaagattcattgcacacatagatataagttccatacatacctctttccaaaagagtagtataaatattctttatataattatgtaatatttttccatccaccttttctttgcctttagaatcttgatacatatccttagatacagtaataatattatttataggatcatagtctatctcccaacctattatcacacctgcataatttaaatcatacccctgcgtcgtatgtatacagcctatctcattaattgaattttcagagtttatccagtctttctgggtagtattccaaatgtacttatgcgcattatttacctcgtatttgttttctatcttaatatcatataacccttctttttgaattttagacagtgtcattttgtgcgtcttccaaggccaggcataccccgccatattccgacagagccccattttgttatttttatctttaattgcagataccatatcctcaacatcctcaaacagcagcagctcataagatgacccaaaagtgcgcatttcttcctgctgacactccaatatattatgaatataatctatgtaatcatttccacccttacacctcatctgagaagtaagcttatagttccgggtatcctcttgccgagacaatgagaaaaatcttagtgcttccacatcagaaggcttcaccgattgtctggaatcataaaagaatagctgataccaacttttttccagtatccagtccaattccgtcgcttctttatctaactctaatgcctcgttagctttatcatatgatccataattaaataatgcacgacgacgcctcaaacgatgtgattcatcaacaatcagaagatcatataaaccttcacccgagttggcaacatcttcggggctaagtaccattttagaatcaagtccctgtattccatcaaaaacttttttcaatgtctcacgaaaactttgtgtaggaactacatacccaactcttaagtccgggctcaaatgtccaattatataactaagattctcatccaatgcctcttcttccgcagtccatgcaggtgaactctttgcatcaatcaatagcttcagcaaataaattccaagaatagacttaccagtacctgcccctccatcaattataaaagaacgggattgattattattccctaaatcagatttcagatcagtaagaatttgcacagcaacattaaattggtccaaattcaaaatcttatatggagaatatttaaataagtcttgattctccagaagagtaattccatgcctgacaacaccttcatcctgaagaagctgccaaatgtgtctgaactctctctgatattcatcacgcaaataatagttatgaacatgctggccaccattgccattctggagtctatatttaccatcagctacaatatatccgataagaaatgcttcaagatccaggattacagatttattaaagactttattaaagataatatatatgtttttcaaagctctgcgttcggtattattccaatgatcacaaatcctggtacatatatttgtagactctcctatataggcttgtcccttttcgtcatcctcgataatatatacaacaggccatctatctttgaaggcagcttttactttagaaaaatgttccttctcaaaggtacattttaagatttgagtttcttgtttgaatatcatagttcagaatatcattaagtatttcttctttgtttcattttgtgttacaataccgacacaatgcaaatatcggaaaataaaataagaaatggcttgaaccatacgtcaaaatgtatgcctcaagccattatttttacttgttaactcaaattttacacaagcaaatttatataatgattaacctctttattaatatccaatcgtaaatctctcctgatgatgcttgggatgttccaattcatcgatcattgcagccgcatagtcttctactgaaatatggctgttacccacgatatccacaatcatatcgtctttgcccaaacggtaacgtccggtacgtactcccggtctcatatctgctgccggagagaaaaatacccagtcaatctctttctccttcatcaggaaattcaaataaaactctcccaaggctttaactccaggcaggatattctcaggaacttcacccgaatccatcagtcgtaatcccggcgcaataaatagtgagccggcaccacctaccatcaggaagcgattcactcccgctttcttcactccatcaatgatagtcagatatactttgatggtttcgtcatatatattaggattattccatcccggattgaatgcactgataacggcatccgctcctttgcaaacttcgcatacttcatcgagcgaagagacatccgctttctttactttcagaagttcgttctctatctttattttttcgggatgacgaactacagctgtcacttcaaagccacgattcaatgcctcatttagcagagcggaaccaacaaagccgctagctccgatgaggagcatctttttcactttctccatattccaacaaaaattagattgttattattagtttaataacaatctaactttcagaatgttggtctccttttagaaaattaattatccgatatagatttcaatcgtttctttcagtttctccaaagaatatggtttggagaaaactacattgcatccagcttgaatactatccatcacaggcatacgaatatccattaatatcaagtccggtttttcccgaataaagctattgattgcttcctgtccgttacgcacccacaggataatatactctttcttcagtaagatattcagctgggcaaagttcgattcgatatcctccacaaccaaaatctttttatgacgtacggattcagaatcaatcttaatagaaagactctgttcggcaacttctaccggataccgcagaatcgtacccgcgccatcagcacatccgttataaagaaattctcgtcaaagatgaaaataaattcgggtaaagcttctattattttacagttatgttcttccagccaaatcacctcaccatgttctccgacacaacgaacctgtatctaatatgctttggactccgaagcaagcattttagcaaaagcagtctgataggcatttatatctccgaggtatgcgaaatggtaaaagtcattaatgcctttaaacctctttcaagcctaacgtgcggaagtaatcgtccgtaaagctacattttcctgtcggaatatcatattcccataaagctatttggtgtgcggcaagtacataaagtttcttttgtgaattttcccgtatgatttcattattctcattcggtgaatataagtttgtatccggctccatagactatcattatattttgtatgtgcattgtttgaacggcagcaaatataaacaaataaagcacaagttgtgtctaatcttattttttttacttagaaacaattatctttgcatcatccaaaaagaaatataatgaatcaagatactatctgcgctattgctaccgctcaaggaggtgccatcggaagcatccgtgtttccggtcctgaagctatttccattacaagccgcatcttccaaccagccaaaaccggcaaattacttagtgaacaaaagccttatacgctgacattcgggcgtatttataatggagaagaaatcatagacgaagtccttgtgagtcttttccgggctcctcattcctatacgggagaggatagtacagaaatcacgtgtcatggttcttcctatattcttcagcaagtaatgcaattgttgattaagaacggttgccgtatggctcaaccgggagaatatacccaacgcgcgttcctcaacggaaagatggacttaagtcaggcggaggctgtagccgatttgattgcatcttcttccgcagccactcatcgtttggccatgagtcagatgcggggaggttttagcaaagagttaacagatctacgcaacaagttgctgaacttcacttccatgattgaactggaacttgacttcagcgaagaagatgtagagtttgccgatcgttcggcattacgaaaactcgcagatgaaatagagcaggttatctcacggctggttcattcatttaatgttgggaatgccattaaaaatggtgttccggtggctatcatcggtgaaacgaatgcagggaaatcaactttactgaatgtattactgaacgaggataaagcaatcgtcagtgatattcatggtaccacacgtgatgtcattgaagatactattaatataggtggcatcactttccgattcattgatactgccggaatccgggaaacaaatgataccattgaaagtcttggtatcgaacgtacattccaaaagttggatcaagcggagattgtactttggatggttgattcatctgatgcatcttctcagataaagcaattatcagaaaagatcatccctcgttgtgaggagaaacaactaattgttgtattcaacaaagcggatttgattgaggaaaagcagaaagaagaattatctgctttattaaagaacttccctaaagaatacacgaaatctatcttcatatcggcaaaagaacgtaaacagaccgacgagttacaaaagatgcttattaacgcagcacatctgcctacggttacacaaaatgatattattgtgacaaacgtaaggcattatgaagccttaagtaaagctttagatgctatccatcgagtgcaggatggacttgattcacatatatccggagattttctttcgcaagatatacgggagtgtattttcttcatttcggatattgcaggggaagtaacgaatgatatgatacttcaaaatatttttcagcatttttgcatcgggaaataacaatccccaatatatttattaacaccctaaatatcccaatatatgttttcccccacaattgacaaccttcttcgaacaatcgattatagtagcaattgccatgagaaaataattaatgatatttcttctggctattactcctcatacctattttttaataaatattcaacaatttctttatctgccggtagccacataacttcattaagggagcttaatactagccaccgtgcagatttatgttcacgaagctctaattcaccagctaaaattgtacacagataacagtgcatagtaaggtgaaaagatggatagtcaaaatcagtagtacatacaaatccatcaatactaatgtcaatacctaactcttcttgaatttcccgtctgagtgcattttcatggctttcgcctttctctattttaccaccaggaaattcccacaaaccttcaaactcgccataaccacgttgggttgcaaagtatttttcattatcatagattatagctgctacaacttctatctgtttcatagcttatattgctttaacatattgtgccattgctggttgttgaagtttccatgtgatattcatagggaaatcatcatgagaagacatatactctactagaccaaaacaatggaaaggacaagtattaccataaccatcctttttctcttcacgaacaaagaggattattttgttttgtgtatcagcttgcttagtatatcgctgtcctccattattttgatgagagtctgtgttttgtgactgccaatggaaatagtgttcattaatgagataatcattatactgtgttgaaggagaaaaatccttatctgatttgtttagcgtcacaaaaagtaatgtagcattatgttcggacaaattaaatactcccgttacagaaccttgcatcttgcgcgcttccgtttgcctaccggcaagcgtaaaaatttcctcacgggtatagcaaccgtataattcaagtccaggcaaaacatcctctcctaaaggcatcgtttttagttgaagatgcgcaagcaaataagaaataatttccgaaatctcttgcctaaaatagctgtacatttccttatggatcaattcaagcgcttcataaatactggcaaaacctgttttatccaaacgatcctgaaaaagagcgtaatatagcatcaaagcatacttataatttttagtatcaagatattgcttacttccatcgataaagagttctataaaatgaaggaatgatgcagtattgtggtgcaataagttagccatccctttctccaaccgtttggttataacatcgtctttgtacgcgatacgacctgcagcgcgcttaagcgatgtccagcaattgttactttgataaagagtacgaatatcttgtccattattctctaaaaactgagaaatggtaggtatattagggtaactattgatttctctgataatgcgattcttgttataaatagcactttggatattatcaagaatatattgtcttgctttcttctccatcacgatactgcagcctgatggcaacaaagtgaatccatctttgatttgcttaacaatattcttttcaggattgagcatcaaagcccggaaacgactagcaaagtcatacttacgattagattgtgctacgaagtcaagtacagtgagttccgtcttacctacagaaaggcgcaaaccacgtcctaactgttgaagaaagatcgttaaactctctgtaggacgtagaaaaagtacagtatccacttcaggaatatctacaccttcgttgaaaatatctactacgcagagataatgaatagctccttcacgcagttctttagcaagttgcttgcgtttatcagatggtgtatccgatgttaaactctgagcattaaatccatacagactcaactgttctgccataaaatcggcatgacgtttattcacacagaaacagagtgcacggcacatatattcattagcgaggtatttatgcaacgcttcaacaatatacccagctcgttctttgctgcaaagtttatccgcaagacgctcgatattgtatttttgcccattccaaagagcatcatcactaagatcagtagaatctgttacgcaaagatattgaaatggtgtgagcaatcctgcttgtaaagcttgtggcaagcgaatttctgcactaattcgtccaccaaaatctggtcgaagatcacgtccatccatacgctcaggtgtagcagtaagtccaataaggagttgcggtacgaagtgagcaaacaattttcggtagctttctgcctgactgtggtgagcttcgtcaatcacgatataatcataaaaatcagcacctagtttctcaaaaaaatcttcaaaacgggagtttaacatagagatggaaacaaacaaattttcgtattcgctttcatcttgtggacggcaattgcctacccacaaagtaccgaaatttgcatcaccaagtacactacgataagtattcaacgattggcgaagaatttcctcccgatgagctgtaaataaaatacggcttctggagtgtatacgacgaaattccttatagtcaaaagctgaaatcactgtctttcctgtaccagtagccgcaacaactaaatttttgaaattcttaagctcttcacgttctacacgtaacttgtcaagaatttgtttttgatgaggaagaagagtaaaatgtcgatatatcacttcattcgaagtatccctaaagatattacgatgtatttctttattaaacttttctatacctccaagtcggaaatcctcaaaattagaactattccagtacatctcaaatgtagcaagagcagtttttattatatgtggattttcaacacttgtaacgcgtatattccattcaagaccttcagtttgagcagattttgaaagatttgacgaaccgatataagcagtattcataccggagttacgcacaaaaatatatgatttggcatgtagacgttcaatatctgtattataagaaatacgtatttcagtattaggcaacgcagcaagctgctctattgctttagcttgtgtagctccgcaataagtagttgttatgatacgcaaacgatttccctctttttggcagaatttaagcagatcatcgagcaatatacggacccctgatactttcaagaaagatacaatgaaatttatctcattagcacttgctatttcacgacgtatttcttctcctagaggaagcaagctactaccgcccgtaaacagattacttacgcgaaagccagagatgggacgaatagtttgtatgcgactttctgcttgtaatagtgcttgttgtctgctcattacctccgttaacaattttgaaggttcagctatctgaatttcatcaataatcccagcttctttcaagatattatttataagatttacgcgatcttcctgattttcgatctcctcaagtttctggcgaatcaccttccccaaataattggctagtatttgtggagactccgcctcatctatattttgtcgcatacaaaccataccttgctgctcaatttcatgaatatgctgctttgttatctggttgataacatgttcgtatatacctttctttagcatataaaagatttatttaagttgtttttcctgcactaccgagacttccataaagctcatctcaccttcaaagacaaaagtaaatataaaaagacagaaaagctaatacaattacttttttctgaatgccaataataccctgttttaaatagatgagtacatccttaaacaataagcctataaaatattcagctaaaatagctggaagaagattaggtctattttaaatagaacagtatctttgtgcatcaataagtttttatgctttatactctaaagcaaatcttttgactttacagaataaacaacataatatggcaacaatagaagaacttacagaaaccattgtgaaattcagagacgaacgggactgggcccaatttcacaatgctaaagatttatcattggcattatccattgaagcagcagaactgaaccaactctttctctggaaatcaccggaagaggcaaatgttgaaaaaataaaagaagaattggcagatgtcctcaattacgcattactcattgctaataaatataattttgatgttgcccaaatcatactggacaaaatagagaagaatgcgcaaaagtatccagttgagaaagccaaaggaactgctaagaaatataacgaattataaccaaacacgatgaccggaaaaagagtattataccaagaaccgcaggctacgttttttcatgatgtaatgaccaatctgtttacagacaaaatgacaaaggccgccacctattataacttacacccaagcaattcagaactaatgtcatggggaaataatgcccctaaaataaaagacttgcttcagttgagcggagttactgatacatatgtgacattcgagtacctcgttccatacaacatgaaacgcattgactgcatcttatatggtaggaactcacaaaatcagggaaatgtagtccatatcgaattaaaacaatgggacaacaagggggttcgggatactgactgcgaaggaaacttcaacgtcgacgacgaagattcagacaccacattccaggtacaggcatacacaggcggaggacaccggctggtatcccacccttcccaacaagtaagaggatacaatgattatctgaccggattcatcgaagtattgagcagcaaagaacttcatatcgaaggactcgcatactgctacaattaccgcaaaaacaaaacacccaataccttatttgatgagaaatacagcgaactcctgcaagcatacaaaacgtacgccggcgacgaagtgcaggaactcgcccaacacctgcagcaagcattaggcaacggcgatggcgaaacgatcttccacaaaatgatcagcagccccatacgcccttctaaaaaactgctggaatcggcagccaacctgattcatgaaggtaatgtatccgcattcgccctaatcgaagagcagattatagcgcgcaatgtcattcttgataaaatccgcaaaatcggtaacaagaaaagtatcattatcgtaaaaggaggaccgggaaccggaaaaacagtgattgccttacatatcctggctctattggcgggaaacaagaaaagttataatatccgttatgccacaaaatcaaaacctttactggaaggggtaaaagaccgattgccgcgtggcagtaaggctaaactgctattttcaaatgtaactcagtttattccggccaactgcgaacctaataatatagacgtattgctggtcgacgaagcccatcgcatctctaatagtgcaaacaaccaatacacgccgactgataaacgaaccaatcttacacagattcaaacaatcgtccaagcagccaagatatccgtattctttatcgacgacaaacaagccatccgaagtgtcgagatcggatcttcccaactcattcgggaatgtgccaaagaatacaatgccgatattgtagaagtcgaattaaaatcccagttccgttgcaatggttcggacaactatctggactggcttgaacaagttatctataatgaacctgtaaaatcatccttcaaagaagatgaatttgactttaaaatattcgacgatcctcaaacactgtatgatgagataaagagaaaagacagtatagacggacaaagcgcacgcctgactgcaggattttgctggccatggtcaagttctctggatgagaacggagattttgtaaaagatgttgccatcgggaacttcgcaatgccgtgggaaaccaaagatactattaccaatattcccaagggatatgtcaagtggtatgaatgggcatataaacccgaaggcatcaaacaagtcggatgtatatatacggcgcaaggttttgaatttgattacataggtgtcatcatcggtcccgatttacggtatgacacagagcaacaatgtctgattacagacattaaagaaatcaaagatcctatgttaaaacgaaatgcggcatattttgataactacgcccgcaacatctaccgtgttttaatgtccagaggaatgaaaggttgctatgtatattgctgtgatgaaaatttaaaagaatatttgagagctaaaattagagatagaaaataagaaagtatggcaggctggctggaacttgtttcaaacaggttccaaacaaaataaagcgtttgttttcggtatcatttacaaaaagctgtcctacagacgacatcagatacgaagataaccattaccgttatacacaatcaaaaaaacaaagtatgtatcttacaagtatgactcacgaggaactgtatgccgaagtgcataaggacctcatcgaaatatcgacccaagcaaatatgttcatggataaggttcgtaagaaaacaaagaacatgctgccatatcctttggcgacccagcgtataaccctcaccaccacccgaagaaatgtgtggacagtggtgggaaaacacaattcatatatgcaaggcgtaggatttcaggcttacgcccccgttatcggcgcttcaagcaatggctatatccaaatgtcgggcttcaagccccgtgatatggtgatgcattacacagcgcatttcatgcaacgatataaagaacgttacatcgaccattatcaaatagaccgcaagggagaaaacttattcgagtactttgtgtataacaatccgcaagtcttgtatacccgcaagaataatggcggctatttcatcgtttccgaccatggtatcgctgtagccgatttcagcgacggactaaaactcatgacccatgtcacttttctgggagatgatgaactgacgctaaagaaacagctcatctatgatgaggaaatcaaaatctacaaaggggcacttgagctgaaacggttaaaatcaagaaaacaaaaggatgatctcgtcacgatttggaatgttgccaagaagcataatgcaggtattgagatggtaaaacgatggtaccaatggaatggagtaaaagtggatgaagattatcttcaacaatgcattgatctcattgagaaatataatgtccagtcactcgatcaatttgcggaactcatgtcccgacaataaaaaggaccttcataaaatcttttttattaaagattattacaccaacatatgctaaaacctcagaactatcgagcacgaagttgccagaaagctacggcagccgcagcagctacattgagcgaatcgacgccgtgcgacataggaatacggactacgtagtcagcttcggcaatcgtttccggcgaaagtccgtccccttcggtacccatcacgatagccaatctgggttcggttgccaagacaggatcatcaatggaaacagagttatccgtgagtgccatggcagctgtacggaagcccaacttgcccaagtcgctgagagaaccgtccatccaagtccatggtacaaggaagaccgttcccatcgatactctgactgcacgacggttcaacgggtcacaagagttacgcgtcagtagtacggcatcaattcccagggcggctgccgaacggaaaatagcaccgatgttggttgtatcaacaacaccatcgatcacgacgatgcgccgggcttcccgacagacttctgccatactgcgcaccgcaggacgacgcatggcacaaagaacaccacgtgtcaggacataaccggtcaatgtagcaagcagttccctgctacccgtatagataggcacattgccacaacgttcaatgatgttggaggcatcgccagtgatatgtttatgctcacacaaaatggctaaaggttcataaccggcgtccagagctctctctatgacctttggactttctacgataaaaatacccttgtcaggctcgatacgattgcgtaactgagcctcggtaagagtacagaatatctcaactccgggatgagacaaagaggatatttcgacaacaggcatattcttatttattactttcagtttgacatacaatcgctaccttgatgacgccgtccagcttgttttcaaagatacgatatgcctcctcaatctcgttcagcgaacagcgatgggtaataagaggagtggtatcaatctttccctcttcaatcagactgaggatctcagcacagtcacagccgtctacacctcctgttttgaaagtcaaattcttgccatacatctcaggcaaaggaaaaagcagaggtttgtcataaagagccacaatcgtgactatcgcattgggacgggcacagtcccacgccatccggaaactatcttcggtccccgccacttccagaacaacatcagctccaccgtgatcactgttttggagtacaaactccttgcagttctcaggtgtcgttatcagtacatcgggataatgttcacggacaaaccgaatcctttcaggggacttttcacagacaatgatacgcttcggattcttcagcatcgagcagagcaaagtacaaattccggtaggtccggcaccaatgaggaggacagtatctttctccgtaatctccgagatacgagttgcccagaagcctgtggcaaggacatcaccgacaaaaagagcctgttcatcactgactgtatcgggaatacggttcagtccctgatcggcataaggtactctgacatattccgcctgtccgccgtcgatacgacagcctaaagcccagccaccgttggggtcggtacagttgttgacatatccgtgacgacaaaagaaacactctccacaaaaggtctcgacattcacggttactctgtcgccgggtctgactgatgtaacttcagctcccacctcttccacgacacctaccatctcgtgtccaaccgttattccgggtactgcacgcggcacactaccgtgtttgatatgcaggtcactggtacagatactgccaagagtcacacgcacgattgcatcccgtgcatccgtaattttcggttccggtttttctcgcaattcaaattttccgtgttcaatatatgtgtatgcaagcataatctcttctttatttaatgaatagatccattgcaaagatagtgatttcaaaaagaaatcgcatagaacaatggtattagcttatcaatcatttctcattcttgaaagaaagccttacatttgtagagaatacaaaacttgtatcccttgctatcataaataaaacaaagtcaacaaatgaaagaagaacccgacagcctgcctgtcccttacaattttgcccgttgcttcaacgaccaatgcccacaagcctccaaatgcttacgccacatagctgcacaatataacggagccgactatctttatatcaccagcgttaatccggcacgctatcctgcggacgggaatcaatgcgaatgttttaaaacggctgtaaaagttcatgtaacatggggacttaaacggttgcttgacaggattccttatgaagacgcagtcagtatccgatcacagttggtgggacactatgggaaaacaggatattaccgactctatcgtggagaacgaggccttatgcccaaagatcaagcttatataaaacaattgtttcgtaacaaaggaataaaagaagagcctgcttaccaacgctacacagaagaatatatatggtaagttgctgtcatctgtcaccaaacgggacataacagactcattatgaacgaatcagcccgtgacagcaggaggtgattgcattgtgacagcatttttgccgtcacaatgcaatcacacatttattatttgttcccgctacgcggtcactaactttacgacatggtaaagcgtaccgctacgtacatgtttggaggggatttcctgctttttcagtattcttccaaatgaattgacccttttcacggacatcggtatcgaactatttctctgaatatcttccataatctccgccggagacaaccactccccttcatcaggctgtgcagcacgaaaataccggaaaaacagctgttcttccggaggaacttgctcaaattcacgattgttttccatcataatcttttcatcctcctggtcgaaccaatagcgttcgccatgttccaattcatacatggcttgcgcgtaaagctgctcataatctatcggacgattcgtgtcaatcactcccgtcacttcgatacagatgaaacgacggctaccggaaggatcggtcaacaggtctttttgattactcgtagcgataaatgaagcataccggcgcatttcgagcacggcactggcatgaggtttccgcatatttaccacaggcttttgcagaatatgtttcaagaagccctgttgtgtcgaactgacctgatcaaattcatcaatattgatgagcgcaaaacgattgagataaagttccgcatctttctttcgcgagaaatcaatgctgtcagtataataggaacgttccgaaggtggcattatactccggcaaaaggtagattttcgcgtcccttgcgccccgaccagcaatggcgaaacactgttcgcgtattttttatcataccctctccaatgagaaaccatattgagaaaccagcggtgaaacaagtctgtccaatacggattccggcaaggaacggtagctgccaattcacggatacggtctttaccgtcccatccgggaagtcgatagagaaaatcctccaacggattgaatacaggcacacgatttgaatagatataccgactgatatccctgtcccacagtggaataccctccatttgtgcatctagggcaatgctattcagcgcccgtttgtcgagaggattgaaacgaaaacggaaagacagcctttcccgatattccacctcggcgatttgtgtgttatagcgaaattcataacggcgtttcatgaattcttcggtctgtaaggctagctgttgctctttgctcagactgatatttttgccgaaacctttacattcgagatatacgttgccaatcatctcccggatcaacacttcttgtttatacatatagaaatgaaaaacggtacgtttcacgacttcttcctgaggcaatcccgaagcaaaacaatttttggccaattgtacgaccaatggttgccatttatcttcccgtaattggaggcctgcttcgctaagatctgtataagctttccgaaaagctgcttcaaaaagcatcaaaaaagcattttctgtatcatatcccggcacggcacgagtcaacggagacttctctgcctgcactgcctcccggaaagtcgtctcttcgggcatcgctgtgggctgcgagagataaaattgcacggaattcggacgatacataatatccggatcataagacaatcgcgaatattgctccaaagtcggctctttgggaagtatatcgaacgggatttggggctgataacatttcacggccagccgataggcgtgagcgtgaaacagttccgcctcttcccgtgttttgggcagtgagttatccggacgagtaaaagtggtccatatcttcaccgtttttccactcgaacccataaaagcgcaacgggtctgcggttgttcactcgctttttgtttcaccagagctatctccgatttattggacaggggaccgacagtcagttcaataataccattgtacgctttcatctgcttctgcccgtttacttttctaaattctgcggcaggaattatctcgggaagcttgtcggcaaacatacaccgatcatctggaagcatatatcttaattcttctctgaaagtggaaaccggacgggattttatctctgtttttactttgtttaccagtttttcaagatccattacgctgagcgctgttgtatctccatttttacggaattgggtaattttcatttatataataataggttgtttgtgtcagcgtcttcgtgtcgttgagactgctaaattactcattatatccgggaccgacaagaaaaaacgaaagtttaatatagaaaagagaagacactaaagaagcaatctaagctggggcatgataaggttatagcactgaattagtttcgtcgccttgaaaccatagtttcagcgaagagaaaccatagtttcaaaggcttgaaactttagttccaacagcttggaatcattagtttcaagcctttggaactatggtttcaagcattgggaactttagtttcaaactgcaaaacaaactgtttcttacagtagaaaagatagttacataccgtgatgaaatcaacgacttcacaacatatcccgaatcacaaatacaagggtgacagcataattgccatcacagtgctgtcacccactgctgtcacatcattaactatttataatctgatagttagaatgaaatcggtgacagatgacagatatattcttctttttaatttatagggagtgacagccagacggatgcaaagttataagactttaaaatttttcgtgtgttcaaccattttccgccatcgcattatattctgcaattttctctttgcaaagacgttcagtcatttcctttagaatctctaaacgtgaaattaagtattccagctgttcgcgtgtaattttgtaatctttgttatagcgggcctcgatataggctcggcataacagatcgaaacactctttttcatcatccgtattttgaggaaaaaccgttaccagttccatcgaaaagcgctttaccattccaccaaggtcttgaagtctgtgacttttcggacggtaattcgtaaaaaccatcaatatagtattataaagtttctcacaggattgatgaagcataaaggcagaaaggttgtatttttctttaagtataaaataatcctttacaccagttaggaagtcacaagcataagggaaaagtttatcaaattcattttgtgcaatatcccgaatctccctaaaactcaacttccgtggtttagccaattgatatttgccactatcgtaaagcaaaattccttcttttacaatatctgtaaagaaatactggctaacctccagattattgttaaccgtatttatatgttcgacaatgaattgcggaaaagcgtgacgacggtattcaaacaaatcatgatatttgttagtgatacgctccagttttctttctgcccgcttgactgctccgttggtgatgacaagaatatcataatcactctgatacgaggtacgaacaccgaactctattttagtatcccataaaacataattacccctggcataactcccgaacagaataatcatctgacagttatcgacgcctttgcagactaagtccagcagaactgtcagttcttcctgcgttcgcttgggcaaatgttttatagacttcttcatgaacacttattttgatgaccttacaaaggtaagaactttaccataccaagccaacaaggctactaaaaatcttaaaaataattatgcttaaatatctccactatatccataaaactatgtgcaacaacagtttctttcgggatagcagaaaatgctatacccggcagttccctaacataagtatttttcagttcactccagattgttggaaaatccaccaataaaggcgattgacctaaatgcttctccgtccatccttccggtttgtcgaatgtttccttatcatgctgtaacagattctcaaagtcttggcaaaattgttcagaatgcagatatacaacacaatctttatcctgcaaaagataatgcaggtcgtagaaatggcgtatttttgctgccatgtcatacatatatttatccgacaatgaaaaacggatcaacgataccagcttttccgtaaatgtctgtcttttatccaacacattcattgaaaatggtctcatatcgtattcttcgataagattgtcgtttcccgtctgcctaaaaaaatcgctgatgaaacactctattaccttttgttcatacggatagggattggcgaatgaattgatttcaactaacagttgtccgacatttactatttctttgatggctttgccaagtatattcggataagcatacatcgctttatagtatctggaacctttgctcgttactccttgtacgacaaattcatccagtccgacagtcatttctttggctatccgtttaataagcatctttaactgattgccgcttaaggaatttgcatctgaaatagctacatctatatcttcagaaaatcggttaccaattttgtaggctttggaaagcgaagtacctcctttaaatatagctctttctgcatttgaatcttgtgccatcagtttcaaagaccgtgttatccaatagtccttttctatatatacagcctttatatccaactgttccgctgcggcaagtacagcatccgtaaacagcttcttattttcgtgtaggttcatatattttccaattttgtttcgtgggtaatactgatgcagatagtggcaatttgtattcagttatgccatttagagactttcggataatacccaatagttctttatcacaacctgtattttccagaatagcaccacacaacgctcgtacatagcttgtatattgcaaggtacattttacgagtatttttttttgttcatcatccaattcctttattatttctttcaaccgcaaacaagcttcatcgggtgatgtgccgggtatttcgcggatgaaacgaattgcatccaaaatgcgtaatacttctatgtttttccgtgtaatcggattaggctgcaatataaatgaaatggtatatttctctcgtttcacagcacggcggtatttgtttgtacctatctgaatataagaggaaatttgagtcgtcagcccaagcgcattgtaggcagaataccctgtaatataacctatcagctttccatcacgctcaatataatctttggctatttggtagacggaaggcttcaatatgccgaactgtgtctttcgtggcttgtagaactttcctttggacagtttcatcaactcaccggaatccgccatacgattcaaagccttgaccacagccgctttactttgtggaccaaaatcaaaatctgatgcagttaatacataatcatcagaaaaattacgaactaattcctttatctcttttgttatattcatgatcaaaccgctaataacgctgcaaaggtaataaaaagtcccgttttttacgtgaaaaacgggacaattcacaaccgtaaggaaaaggttgcctaattctcttgcacaatatcccgaatctccctaaagctcattttcctctaatctccaacacaatctttcaaagaacagtccgcctataccaacatagcatctctacgaacagtcccttttcagttatccctgccgcaacatttcttatatttctttccgctcccacaagggcaaggatcattccgtccgattttcgttccggagaatgtatcataaaacataccatcaaccattgtttgcattttaggagtgatatccatgcctgctgctttcatcgttggtccggcaacgatacgaggaggagttttcaccgattcacccctaccaagtaaagcagatgcttcggtggacgagtgacctttcaagaaccaacggggacaatcattacaatagtttacagctattccaaccacttcctgaagttcttgcatagaaagaaccttcgtgtctattgccgaaacaatagcagacatcggattttcgtccatctgtattgcataccacagccactgtatcttggcctcagccagttcttcattataacctaatttcctcatcataaatcctttcagttgatccgaatgcggattggaaatatagaacacaggcatcgttccagccgacaaaacctcttcgacggtaaacttcttcaaactttttatagcacgatgtgcatataatctttcctccaagtcctcaacttccaataataagggagatcgaacatacataacagaattatatatatcttctatatcaaacgtcagttgtctcatcaacattgaatttgataaacctttagctatttcgtcctttgtcattgaacccttcaagtatccggtcagttgcttcaaaaattccgtataaggtaagagaccataaagatttaaaattcctaaagcatactgctccagcacaaaacggctgttctcttccgttgatgtcaaaaacttatcaatatggggagcaaccgcttcacgcaactcatcacaaatcatataacgaatcttgtctccgttcaaaccacggtcggtcgcaacaaaagaaagtaattctaatgtactcgtcattatcatattaggttcttccacataggtattggctcctgctttcaccaatttttgaaggagcaaccattcataatgtgtcaactgcggaatccatatatccggacaagtcagaacagcttctgcaagacaggatacatactcttcttttcgcaattttgaaggaatgggaagaagaagcaactgtgctacatctttcaattcttcttttgtactcaatcttaaaccatccgccaacttcaccgacgatttaaacaactctgaatgacattttaacatatagaaggcttattattttgtttaccgacaaaaatagataattcttatgtaggattactatttccaagtaaatatttgctgataaaattagtatttatatctttgtgactcttaagacccaaatacaaaccaattaatgaaaaaattagtatgcgctcattcatcctgcttctctgtctgatccccactattatctgtgcacagaatctttctctggaggaccaactcaaacaggctatcaaaggcaagaaagctgaaataggtattgccgtcattatcgacggaaaagatacggtaactgtcaacaatgacattcattatccattgatgagtgtattcaaatttcatcaggcgttggcattggctgattatatgggaaagcagcaacagtcattgaactttgaactgaccataaagaaagaggatttaaaacccgatacttatagtccgctgcgggatagttttccacagggaggattcaatatagacattgcggatttattgaaatacaccctgcaacaaagtgacaacaatgcttgtgatattctgtttcaatatcagggaggagtagatgcagtgaaccagtacatccattccctgggcgttacggattgtgccattgtctgtacggaaaacgatatgcaccaagacgaaagtctgtgttatcaaaactggactactccgctggccgccgcgagactcttggagatattccgcaaagaagcactgttcccgcaggaatacaaagacttcatctatcagaccatgacagaatgccagaccggacaagatcgactggttgctccattgctcggcaaagaagttacaatcggccacaagacagggacgggtgaccgcaatgccaaaggacaacaggtagcctgcaatgatatcggcttcgtcctcctgcccgacggacacgcttacagtatagctgtcttcgtcaaagattccgaagagaataatcaggagaacagtaaaatcattgcggacatctcacgtatcgtttacgaatatgtgacgcatcaataaaatagaagtataacaacattaactacgattcttatgaagctacatcatatcgccatctggactttccgtctggaagaattaaaagatttctatgtccgctttctgggcgggacaagtaatgagaaatatatcaatcccaagaagggattcgaatcatactttatctcttttgatgaaggtcccactctggagttgatgagtcgggcagatgtgcagaataccccgatagaggaaaacaggcggggactgacacatcttgcgttcacatttcccagcaaggaggagattcttcgctttacggaagaaatgcgctccgaggggtataccatagcaggtgaaccacgcacttcgggcgacggatactttgagagcgttgtactcgaccccgacggaaatcgtttggaatgtgtatacaagaaagaaccggaagcagaaagaaccgaagcggctctatgcccgaatatcgaaacgaaacgtctgctactgcgcccttttcaggagaatgacgcagaagcattctttgcctgttgccagaaccccaatttggggaataatgccggatgggctccccacaagacgttgaatgaatcccgtgaaatccttcacggcgcatttataggacaggaaggtatatgggctgttacattaaaagatacacagcaattgatagcttccatcggcatcgtacccgatccgaaacgggaaaatcctcaggtacgtatgctgggatattggctggacgaaccgtattggggaaaaggatacatgtcggaagcagtgcaagccgtgctcaactatggcttcaacgaactacagctcagcctcatcactgccaactgttatccgcacaacaaacgttcgcaacaagtgctgaagcgaaacggatttatctacgaaggaatacttcatcaggcagaacttacctataacgggaatatatatgatcatgaatgttactacattcccaatatagcacgccccaccgaacaggattacgatgaactgatacagctgtgggagaagtctgtgcgtaccacgcaccactttctgacagaagagagtatccagttctataagccactgatacgcaaccactatctgccggcagtagagctctttatcatccgcaactctcacggaaagattgccgcattcatgggattgagtgatgaactgatcgagatgctgtttgtacaccccgacgaacagggaaaggggtacggaaagcgattgatagagtatgccatccgccagaaacagatcgacaaggtggatgtaaacgaagacaacgaccaggctctccggttctatcagcatctgggattcgagatcatcggacgggatgaaacagacagcatgggcaagccgtatccaatcctgcacttacaactggccgacgataaaaaataagatactgaacccaaaataaaaatggatttacgcacacaactggccacacgcttccatatagagaatatacgggaactacttcattatataaaagaagacgaacggctcagagaggaaatttaccggctgatctttgatgaggatgacgttgtctcttatcaggcattgtgggtttgtacgcacttctcaaagcctgaagtagaatggctgactctgaaacaagacgaactgatagacgcagcacttacctgcccgcattcgggaaaacgaaggatgttactgaacctgctatgccaacaacagctagccgaccctccacgagtagacttactggatttctgtatggaacgaatggtatcgagaaatgagccggcaggagtgcagtctctttgcatcaaacttgcctatcagctgacctgctccatccccgaactacagcaagaattgcgcactatgctggagataatggaaccggaattgttggttcctgccatacgttcagtaagaaaaaatacattgaaagctatccaagcaaagaaaaagaaagaacatccgaactcataatatattcagatggaatatctgggaaatacctgtgacggaaatctgtataccgatgcaaaaggtaaaaaaggcaacgagtttattaataatctgatttcctacaggtcccagtttctgaatgatcctctgtccctgtgaaagaaacacatagagtatcccagccatacaaataatgaccagcgcaatgaccagataattgattccggtatgcaacagtttgcctttcacactggcagatgccatcaaagtaaagatcacggatatactgcccggaccgatactgataggaaacgtgatgggataaaatatcttctgctcgatgctcttccacttgaagctgtccacattctggctggtcccttctttatcggaagaattggaatcacccaacagctcaatcgctgtcttacaaataagtattccaccacccagttgaatcacaggaatcgccagaccgaaaatcaataagaataaatgacctatcagtaaagtgcctacaccgatcattataaagttaatggttagtttctgaatagcagtttttcgttgtgaaggatcaaggtttgcaaagaatccattgacgacaaaaccgtttcctaaaggattgatcaccggaaacaatgccataaaagaagatgaaaatatgattaaaagactacttaaagacataacgctcactttttaattgcttcatgattatttgaatacatatatgatatgtaaaacactcagcagcgcttatggatgccacaatcatgacaaacctcttattattttgatattttaaccgatttccgtgtatttacatattttacatccaataaataaaacaaaaggccgcttcctttgcaggaaacagccttatcttatcttttcatcgttactcaattaaaataatacaggaacacagcaatcccttcaagggctttcttcggttgatccttaatctcaattgcaaacttgatttcagcttttgccacaccgcgcagattggtcagtgagtgtagagtagttaccagacgaatgctctgtccggacaaaacagcctgaccgaatttcatcttatccatcccgtagttgatcatcattttcagattgttcacctgaataatctgattccacagataaggaagcatggaaagcgtcagataaccgtgagcaatcgtactgtgatacggactgtctacttttgcacgttctgtgtctacgtgaatccactgatgatccagtgttgcgtctgcaaaaaggttgatacgttcctgagagagttccacataatcggaaacacctatttgttgccctaccagcttttcaaattcttcgtacgagttgataataactttttccatcgtctcatcgttttatgggggttatacatattgattaatggggcaaaaataggaaaaataaatgatatgccacctatttacatgacaaaagcgttaacataaaatttcatagatgctcctgtccgttgaatgcctgcttcagcgccgtacttaatatccgatacccttttccattcaaatgcagatcgtcaatagtcagctccggatttaatctgccgttcatcaataattgatcaaaaacatccagataaatgacgcctgtccctgtcagttttgcaactatcttctcattcagtatgcggatgaacttgttcacagccgtactgtaatcatcataatcattacggggaaaaatacaaaagagatacgtttttcgggaaggaaccgcaagaacagctttcacataccgctctacataatcatctgtattttcttcattcagctgataaatgtcattgctcccgaactgaatcactacctggcagtcggatgtatcttcatgaaatgactcgacatacgccagcccttctccgggagcaccgtagttcagacattcccattgagggaaatatacattcagtgcccagaatgccatgtggctgttacctacaaaagcgaattttggtttgtcttccattttattcctctattttattccaactacaaaacaaatatagaataaaattcgcggatttgccttacttttgcaatcaataacgatattcagataagaatcaatgatacattttttcgaccaaccggtttcccatattgcactaccggaaaggtttacataccctttcaactatactcctcatccgctatgtgtattagcggccgaagaagtcaaagcttatatctcgacaaagaaagagtggctagaggaactgactctcggaaaaatgttcggagtactgatcgtacaaacccaggaagaaggatcttcctctatcggttatcttgctgctttttccggcaatctggcaggaaagaatctgcatccgtatttcgtcccacctgtttacgatttgctgcaaccacagggattctttaaaatagaagaagaacaaatttcagctatcaatgtccgtatcagtgcattggaagttaatcctcattatctgcacttaaaagaaaaactggacagggaaacggaacaaacaaggctggctcttattcaagccaaagaggaactaaagacagcaaagaaagaaagggaacttcgccgcaagtcatcccctgccctgtctaaagaagaacaggacgcacttgttcgtgaaagccaatatcagaaagcggaattcaagcgattggaacggggatggaaagaacgaatcaaaacgctggaagaagaggttatcacctttgagacggaaatagaaaaactaaaaaacgaacgaaagcaacgttcggcagccttacagcaaaagttattcgaacagttccgtatgctgaatgcgaaaggagaaataaaagacttatgtactatctttgaacaaaccgtacacaaaatcccccctgccggagcaggcgaatgtgccttgcccaaattgctgcaatatgcctaccttcaccaactgaagccattggctatggccgagttctggtggggaaactctccgaaaacagaggtacggcatcacggttattattacccttcgtgtaaaggaaaatgcgaaccgattctgcaacacatgctgcaaggactggaagtagacgggaatccactttcgccccaagcacacaggaaggaagaattagaaatcgtttttgaggacgaatggctggtggtagtcaataaaccatccggtatgttgtccgttcccggaaaagaagaggagacggattccgtttaccatcgtgtaaaagctaaatatccggaagctaccggtcccatgattgtacaccggctggatatggctacttcggggttgttacttgtcgccaaaactaaggaagttcatcaacacttgcaggaacagttcatcaatcgcagtattaagaagcgttatgtagccttgctggatagaaatggattgaaccagcaactcgaagaaacaggaaccatcaatcttcctctttgcctcaatccgctcgaccgcccccggcaaatggtcagtgaagaatacggcaaaccggcagttaccgaataccggattctgaactattccgataagtacatacgcatcgctttttatccattgacagggcgtacccaccaactacgggtacatgccgcccatcatcaaggattaaactgccccattctgggcgatgaactctatggaaaaaaggcggacaggctctatctccatgctgaatatattgagttccgccatcccgtttacggcgatatcatctgtatacagaaggaagcggagttctaaaaatagtttcttccgatatgaactaaattctttttgaaatgtatataggggtaattactaactttcaaaaagaacctgactatgaattttaagtttcgaattacaaagtatttggcggtatccgcactggcggtgctgctgttaggagcctgctccaaaaacaacatttatatggatgttgcctatccgaacggagaaggaaataatggcggagaagagggcaacaatgacaatcctgacaaaaaggatgcactcattactttcagtgcttccgtagaaggaagaaatataacgcgtgccatgtctccgatgggaaaaggattgcagagctggttatgtgcctacccttccaataccaccaatacgatagagggagagcctgtcggtgaaggcaactatatcacttcttctcccggagtgttgacgggaatacaaagttataaaatgtatctcagcaatgatatctatagtttttatgctgtttcctgtaattccagcaaccccgcccctacctttaccaacggcaagtccgaagcattatccaatggagtggattatctgtggtggcacgccctgcatcaggatgtgaccagttcacaagtcaacattcccatcacttaccagcacgtagccactcaggtcgtgataaccataacgggaggtgagaatattacactcaacaaagtactctccgccactattactcccacgaaaccgggagctttcatggatctgtcaacagggatcatttcttcagaagtcagttacgataagccagccaacatgggaatcaatgatttcacggttcaatatatcatgcttccgctgaaaagttccgacccgatggctttaacgatggaattgatggtcaacggagaaagtttctcacgtacttacaatacgaccattaccccgccagacaatattctggctgccggaaattcatatcttttccgtgcagtaatcaacgaaaactccgtatcattcggtaacgtgagcgtaaaagactggacggatgtagatgaaagcggtaacccgctgtatccgatacaagactaaaatatgataaagtgtgtgtcaaaagtaactaaactcccctacgggtatattgacttttgacacacacttcaattatgcaacgacacttgtcagcacctgacgtttcaacctgcgataaacataaataaatgcaggaatcaaaaacaaatcagccgctatccatgccatcggatcaccgtaacaaacagcgataaagccgaaagccgggacggcataaatactgacgagaatacgtgcaatcatctccgacactcccgaaaacatagcgagattagtatatcccaccccctgaatcgtatagcgcaggatacaaagtaacccaagcatcgggaagaaagagactgatatatgcaggaaaagttctgttttctccaagatctcaatttccgacggatcaacaaaaatcaaggcaaaagatttggctcccagcatcagaatcaagaaagtgacggctgtatagataaccatcatcagcgtgctggctttaatccccgaccaaatacgttcaggctttccggcaccgtaattctgaccgctaaaggtagccatagccatacccagactctccaacggacaaaggaaaaacattttgatacgcatcgcagaagtaaaagctgccacacacgccgtacccaacgcattattcgcactctgaagcatgatactgccaatggccgtaatggagaactgcaatcccataggaacgccaatggaaagcaacgtcttcgccagcttcgactgatacttccgttctttcggcgtgccccgcagaatgtcaaacttccgatacatataaacgtaacaaagaaaagcggaaactccctgcgaaaagacagtagcaatggcagctcccatcactccccagcccagtaccagaatacagaataaatcgagaataatattgagcaccgtagccagtaccaagaaatagaaaggtgtcttactatctcccaaagcacggataatgctcgacaacagattataaaagaaagtacaaggtatcccgatgaaagtaacaagcagataagcatacgctccttcaaagatattctccggtgtacgcatcatcttcaggatatccgcacaataaatactggtaaagatggctatgaccacagacatcacaacagcaagttgcagactgacggaaacgtaactgcgcatcgtactataatccctcgccccaaacttctgtgccacggggataccgaatcctccacaacatccgttgcagaaacccagaataagaaacacaacggatgtactagccccgacagaggctaacgcattaatacccaaaaactttcctacaattgcagcatcaacaagcgaatacgtttgctgcaacagattgccgaacaaaagcggcagagtgaaattaaaaatcagaggtaatgccggccccgccgtcatctctttagaagttgccatacgtctatgtcctaaaaattggctgcaaagatacagaaaaatccggttgaaagattctaatcccgcaccctctttttattgacataaatcaaaaaaagacaaagtgccggcaactgtctatctcttcaccagtcttttcggcgaaccatgccaggaacaacccagacaataaacttccgtcaaatcaaatccatcggtggaagctgccggatctttaggcacaacttctccattttcgagtacatagaccaaaagacgctctttacggtcattcaccacatatagggcagcaatcttgcattgcggacataataactttctcatgccgcaaagatacgcatagtttccagcaacggcaatcattccagtggaagttctttgcagaatatgcgatcagtttattatctttgccgaagtgaagccagcctccaaagccaaaagaaaacaaatggaaacagataaaaaaccgcgtatcactcaggaaaagagaacagtagagatcatgatccgtctctattgccggaaaaaagagaagaatgcaaccctttgtccgaagtgcgaagagttgctccgctacgcacatgcccgtcttgaccattgtccgttcggagagaaaaaaagctcgtgcaagaagtgtcccgtacattgttataagcctgccatgcgcaaacggatgcgagaggttatgcggttctccggtcccagaatgttattctatgcccctttagaggcgatacgccatttattctcctgagcggcaaagctataccggcaaaatagtcttaacggtttttccagaatcccggatagaagagtaacagaacgctgaaaagttccagtctgcctatcaacatcagaaaagaaagaacccattttgccaagtccggcaaagaattccacgagtatgcgggaccgcaactacccaatcccggtcccacgttaccgatactggagattaccgtactgaccgattcggagaaaccgactcctaaaaataaaagaatcgtccagccgatcagaataatcaccagataaaaagcaaagaagagtaatacagtcgttacgatggaagaagatacggtttgtttgttaacccgtaccggaagcaccgcattcggatgaagcaggtgtttgaattcattccggatggtccgcgccacaatcagtaaccgcatattcttgatacctccgctggtagatcccgtacaacctcccgaaagcatcgctataaacagcaacagccacgtgaaaggaggccacaaattatagtcatccgtcgcaaagccgcaggatgtatgcaccgtagctacctgaaacaatgatttacgaaaagccagctcccatccatagttgttctgaaatacgagtgccaaagtgataagcaatgtcaatatcccgacagagcccagaaaccaatgcgtttcttcatctttaaacaagcggccgacttttcctttcagacacatcaggaataaggaaaagttaatactggagataatcataaagatagcgacaacatactcgatatacggagaattccagtaagaaatactgttttgtttggtagaatatcctcctgtcgccgtagtagcaaatgattgacaaatggcatcaaataaatccattccgccaaacatcagcaggatcgtctccgaaacggtcaatatcagataaacagtccacagccatttcgccattacattgattttgggatgcgtgcggtcatgagtcactccggtagtctcggcagaaaagagctgtacgccgcctgtggtaaagatcgggagaatggcaatcgtaaaaaagacaatccccagtccaccaatccactgcgtcaggcttcgccaaaacagcatcccatgtgaaagggactcgatatcatcgagtatcgtagctcctgtggtagtgaatccggacatcgtttcgaagaaagcattggtgatggtatcaatgctcccgctgaaataaaaaggaagcatcccgaaaacggtaaagaatatccatgaaagagtgacgacacaatatccgtcccggcggctcatcttattctccgctccccgtccgtaaagcaataataatcctcctgctacggcattaatcacacacgtataaagaaaatacttataatcatcctctccgtaccccaacgaaataccggcacacaaaaggaacattcccaactcaataaaaagcaacgtcccaagcacccgtcctatcattttcggattgatcatgctgttgcttttagcacgcgcatacacactattgtctgatatatactcttccataactcatgaattactctgcacgaatcccatagctaatagtatgccaaaacagccgtattctttttaagctgctatttatcagcaacatactatttctgctttgaaaaacgagaagacttctaccctaccaaaatgaaaaggtttcctgtcaaaacgaaaaggatggctttcaaaatggaaagttcccctttcaaaatagaaagatttgactatctttgttccaaaaagatgaaacgagccattatcataggcgccacctccggtatcggaaaggaagttgcccaacgcctcctgtccgaaggatggcagatcggcatagcgggcagacgccagtcagctctcgaagatttccggcaaatcgcaccggaacagataaaaattcaatcactggacgtcactcaggaagacagtgccggaaaactggatgcgcttatccatcaattgggcggtatggatttatttctgctcagttccggcatcggtttccaaaatatggatttgaagatggaaatcgagctgaataccgcacgtaccaatgtcgaaggtttcacacgaatggtggataccgctttttcctattttaagaacaatggaggcggacacctggctgtcatcagttcgattgccggaactaaaggtctgggagttgcccctgcctattctgcaacgaagcgctttcagaatacatacatcgatgctcttgaacaactcgcccacctgcaaaagttaaacattcactttaccgatattcgtccgggatttgtagccactgacttgctgaatgacggaaagcattatcctatgctgatgaaaaccgaccaggtaggccgcgacattgtacgcgcacttcatcggaaacagcgggtagctatcattgacggacgttatcgtattctcgtattcttctggcgaatgattccccgatggatatggaaacgtttgccggtgaaaacaaaatagcaagatcggataactgagaacttattgaaagtaactatatttgtaaacagataaaagagaattatttatcatgcttttactcacttaaaatcaataaaaaatggaacagaaaatttgtcagtgttgtgctatgccaattgatgaaacgacattcggaacagaagcagacggcagcaagaatgaagagtattgccagtattgctatgcagacgggcattttaccaaagaatgcacaatggatgaaatgattgagctcaacctgaactaccttgaggagtttaataaggattcggaagtaaagtacactatagaagaggcgcgggcaacgatgaaagagttcttccctcaactaaagagatggaaacaataggctaaaaagggactgacccgaaagttcttcttccaaacgtatctttgtcacaaatatccattacagcaaagagaaaatgacttttcgtgcttttaggtcagcccctatttattcaactatccgcattcatttccggatggcgttcaagccacctcactgcataggagcaggtagctttcggtttcatcccgttggcgagtgcaaagtcgtaagcagctttcaccagtgcggcagcaattccgcgtccttctatcggtttagggacaatcgtgtgaataatatcaagataatcacctaacaggcgatattctacaaatgcggtacgaccgtcgacttccgtcttgaatagtttctgttcgggctgatgagtaattttgtaatccataatgtttattttaaagttgttcaatccattgtagccgattcgtatcatagccacgacgttcggcggcagttactaatttcttttttatatcttccggcagttggggcgtccgactcaatatccagagatatttatcggtactgctgcctataagagcataattgtaattctcctgatccaattccatcacataataatcggaatagaaattcaagaaaaaagagactttcagtttaccgggctgtgcagggtcgggaatcttggcgtgtccagtagctgttttacaaatatcgtaaggtgaattgcgtttatatccccgattctcaacacgaattgttccatcggaacggagggtataagtagcggtcacttccataagcccacgttcgaaacgatgatcataacgggctatctcgtaccaaagccccatatagcgtttcagatcaagccgatctaccgtactgtgatctgtctcctcaaacaacttctctatggtaggaacggaaaaatggaatccggcttccagcaaacgtgtaggacgcacactctgtccggctgtcagaaaagaggcggcttcaccgtagagcaaacgaaagaccgtttgcggaacaatcaaagttgtccacgcatgatacgcctttcccatcgcacgtgtaaacgtggactgtgaaactgcttgaggagcaaccaaattgaaaacacctctcaactcttcattttcaataaagaaggccatggcacgacaaaggtcacgaatatctatccacggaaaaggttgcgtacccggccctatgacggcggcaacctttgttgcgcgtagcgggcgaagcatctgttgcatcgctcccccatcgggagaaagcactacaccgaaacgggtaatgacaagcctggtcggttgcggacaacgcttcgcttccttctcccacgcataacaaagatcggacagaaaaccatcgccacgagtctgtgtatactcgtccgattccaccaaagaggggtaatatcctacagcagaggccgaaatcataagtttcggtttggttttgactgcattcaaggcacggataatgcggtgtgttaccgttatccggctattgaaaagctcttgtttatgttccggcgtccagcgctgattgataggagcgcctgccagatttataatgacatcgcaatgcgtcagcgtctgaaccaaaagtccggacataccttcccgaaacatcgctcttcccaaaggaatgatccgatgtccacccttttcggtcagatagttagaaagatgtttgcctatatatccggtggctccggtcattgctatattcatcttgattcttcgtttttttaactatactagagaaacgtatcaaaagcagaaaaggttctttgaaaaaagtaaaataaactatttcattgcagttgttatatatattgataaactctgccccctacggaggtatgcttgtgccaacattgtggcacagccgtgccaagcctttggcacaagtgtgacaagctgttggcacaagtgtgtaaaagcaaggcgcagtattagcatgccggataacgtctctcaacatctcagaagaaagtgacactccggtaaacggatgtattttgttctgccgaattagggctattctgattaataagcattatctttgcaagagaacatttatagaaccataaaaaagaaagaacatgattgaggcacccgaagcgctctatctatgcgagcaactgaacaagactgtcaagggaaaacgaatcacaaatgtattcaccctgttcactcctcacaaattcgcttggttttccggaagtcccgacgagtatgccgaatggctgaccggaaagtcaatagaccacgcacgttcacaaggaggcatggtagagatgacaataggcgacaaaatgctgatacttacggacggagtaaatctccggtattacgcacccggaacgaaactgcctgccaaacatcaactcctgatcggctttgaagacgaaagctgccttatcgcttccgtgcgcatgtatggaggaatcatgtgttacagcaaggacgccgccaacggcgtactttccgaatattaccggacagcgaaaagcaagccgcaggtcatgtcggacgctttcagcaaagaatatttcctcggactgattaatgatgaaagtgcgcagaagaagtccgccaaagcctttctggctacagaacagactgttccgggactgggaaacggtgtattacaggacattctgtatcatgcccacatccatccgaagaaaaaaatagcagcattaacggacaaagagaaagaaaatttgttctatcaagtaaaggagaccatgaacgatatctaccggcagggtggacgaaacacggaatcggacctgtttggagagaacggcaagtacacagcttgcctctctaaagacacggcaggcaaagcctgtccccgttgcggagaaaccattgtcaaggagaattatcttggcggtagcatctattactgccgtggttgccagatattggaataagaaccaatcaaatgactaaaagaaaacagaaaatgaagaaatttaccaagatcaattacattctaacctttatattagtgttctgcatcggagctaccctgcctattctgatcggtagcagtcatgtagacgaacagcattccgccaaatcggaagtgccttattgcgtcacctcacctaccgtccccgagcaggtgacttttgacggagagacgatcgacctccgccgttacgaccgccgagaacggatggatcgggagatgatggcgttcacctatatgcactccaccaccatgctgcttatcaagcgtgccaaccgttacttcccgattatagaaccgattctgaaagcgaacggtatccccgacgatttcaaatatctgatggtcatcgaaagtaatctcaacaacatagcccgctctccggccggtgcagccggattatggcaattcatgcctgctaccggacgcgaattcggactggaagtaaatgagaacgtagacgaacgttatcacatcgaaaaggcaacggtagccgcctgcaaatatttcaagcaggcttatgccaaatacggtgactggatggctgtatctgccgcctataatgccggacaaggacgaatttcctctcaactggaccagcaacttgccagccacgcaatggacttatggctggtagaagagacttcccgctatatgttccgcctgctggcagtcaaagaaatattcaagaatcctcagcgatatggattcctgctgaaaaaggaacacttgtacccgcctatcccctacaaagagataacggtcactacccccattgccaacttaagcgattttgccaaacagcagggaatcacatacgcccaacttcgggacgcgaatccttggctacgcgaacaaagcctaaaaaacaggaccggaaaaacatacgttctccagatacctacacaagagggaatgtactatgatccaaagaagacggttgcatataacaagcattgggtaatagattaatgtaataggtaataagtagcaggtaataagtaataggtaaaatacaggttattgggatattggcctgttaactgattattctcatgaaactaaaagaaagaatccatcattttctgaatgaccaaaagctgaaacataagctgtacgtcatcatcttcgagtcagacactccttcgggaaagctgtttgatgtggttcttatcggctgtatccttgccagtgtattattagtcattatagaaagcctgaaagggctcccctcctatctgactaccccatttgtcataatggagtaccttttcactgctttctttacctttgagtatctgacacgaatatattgctctccacgcccgaagaaatacatattcagtttcttcggcattgttgacctgttggctaccttgccgctttacatcggtttgatctttccgggagcacgctatctgcttatcatccgtgcatttcgattgatacgggtattccgtgtctttaagctattcaatttcttgaatgaaggcgaacgactgctcaccgcacttcgggaaagtagtaaaaagattgcggtcttctttctttttgttgtgattttggttacttccatcgggacgttaatgtatatgatcgaaggaactttgcccaattctcagttcaacaacattccgaacagtatctactgggctattgtcacaatgaccaccgtaggatacggagatataactcctgtcaccggactgggaaaatttctttcggcttgcgtcatgctgatcggttacactatcattgcggtacctaccggtattgtgtccgcctccatgatgaaggaatataaacggagaagagacaaagaatgtccgaactgccatcggtcagggcatgaagacaatgcgcagttctgcaagtattgcggacacgatctgaatccgacttcagaaaacgaaaataaagagagcgtacaataagcaatcgccaaacaagagaatcagttattccaattaacgtcgtctgaatatttgctcaaacagaaagataaagatacatcctgctccatagcagacaatatctttccaatcgaacgtggagcccagaatgattcttaatgcacggttggtgattcccaaagtttccactaactgaaaatattgcagtacttcgacaaaacaagcgaacaggaaaacgtaaaacgacagacggggaacccctgtcgggataaatatacgtacgaaactatataccagcaccacgaccaaagcatctcccatataaggacgtatgaaactatcacgtatatacaacgctatgaatacctctatacaaaatattaccaaaaaactaatgatgtaaaatatccttttcttcatttcttattcaatctttggcgcaatgcatggttttgtttgcgaatatacgataaaatgcagatgctacattcaaatattactaaattaatagcacaaaaagagaaaagaattgtatatttatagaactaaccgtttttaaagaaaaaaacagaagaaacaaacaaagaaaagaaaggagactgaacctatgatgttgaacgttgattttatgttaagattactggtggcaggaatactgggagccatcatcggactggaccgtgaatatcgcgccaaagaagccggataccgcactcacttcctcgtatcattgggaagtgccctgatcatgatcgtttcgcaatacggatttcaagagatcatcaaagaaaacagtgtgacgctcgaccccagccgtgtagcggcacaagtagtcagcggcatcggattcatcggtgcaggaaccattatcctacagaaacaaatcgtccgcggactaaccacagccgccggtatatgggctacagccggcatcggtctggcagtcggcgcgggaatgtacaccatcggcatagctactaccgtactgactctgatcggcctggaattactcagttacatcttcaagagtgtaggcatgaaaagttcgatgatctccttctctactaacaacaaagatactttgaaacagatagcggacagatttaattcaaaagattatatgattgtctcttacgaaatggaaacacagcattcgggtgaaatggaagcttatcaagtcacaatggtcatcaaatcgaaacggaacaatgatgagggacatttactttcgttgatgcagaaatttccggatgtgacggtgcagcggatagaataagcctacttctgcttctccgtcagatacttccagtagcggacaggcatatcctttctatgcttcctcggattcatgcgttctttaatgcagatagccttgaaatacgttttccagagcttctgaaagatcttctcattttcatccatcaagctctcgtccagcatacccgtaatcagatgagcttcccggctgtcgtcatcaaaagagatcgtagtcacttcctgcaaatcatagtaaaagccataacgccgcttcatatcatagataatccacttctgatcggcaaaacgatctttgaaatgttggacagtaagtggtaaggcattatactgcggttcgaaggcagcaaagaaagtaccgtccgccgctttctgaaaacgcacgaactgcatcagatgcatccgttcaccatccaccttcttccatatctgggcaagcagaagcacatccggatcgccgaagttagtctcgatagaacggggagcgtcgatcgccttacgaatataacggaagataactatccctatatcgggcaattccgacaaccaacactgggtgaggcagccaagcgcggaagaagagactttcttctgcaagccacgccacacgcgggcggctttctcttcatcggtgaccaccgtatgcaattcatcataaaacaaaggcaaagcatccccttccgacaacaggaaatcgggaaaggtcttacgaaaataagcgtcgaagacagcagtcagcagaccatcaaaagttttatcgtagatatagacgttcattatcttgcggtttacaacatctgaaactccatttattccccaaaatccagtaccaactggcggtcgtccaccttcttcttaggcttcggaagcagcagactgcgtacccgctgcggagaaagctcattcaccgtctgcatctgcaaaggcaattctctgcatgtaatgaagtactgcgcttttttcatcactacgcctatcttcttcaattcataaaaacctagacgggaaaaacgacgggatgccacaatcaacttagccgacttcaccccgatgcccggcacacgaagcaacatctcataatccgccttattgatatcgacaggaaactgttccggatgacgcaaagcccatgagagcttcgggtctatctccagatctagatcaggatatgcgtcatctacgatttcatccactttaaactgatagaaacgtagcagccagtccgcctgataaagacggttctcacgtaccaaaggcggttgtttcagtgcaggcagacgtgtatcgtacgtattcacggagacgtatccggaataataaacacgcttcatcgtcggtcgcccatagagtgccgacgaaaggtaaaggatatctttatccgactcggaggtagcccctacaatcatctgcgtgctctgtcccgcaggcgcaaaacggggagcatgacggaacttctgccgttcttccttactttccagcacaccttgttggatatacttcatcggagcgaaaacgctcttatgatctttttcgggagccagcagtttgaggttctcttctttcgggatttctacgttgacactaaggcggtcggcatacagcccggcttcattcaccagttcccggcttgctccgggaatgcttttcagatgaatatatccgttaaagcgatgcacctgacgcaaatctttcgccacacgcacaagccgctccatcgtataatccggactacggaccacaccggaactaagaaacaagccttcgatataattgcgccggtagaattcaatcgtcagctctactagttcggagacggataacgtggcgcgaggcagatcattactgcgccggttgatacagtaggcacagtcgtaaatacaataattggtcagcatgactttgagcaaggagatgcaccgtccgtcttcggcaaagctgtgacagattccccaaccacctacggtattgcccagcatgcccggtttgttggagcgcactgtaccgctggatgcacaggatacatcgtacttggccgattctgcaagtatctttagtttagtgaggacattttcgttcatggacccaatctgattacagacgcaaatatacgatttaaatcggaatgccggttgataacgaaccaaatcactcgtattttgttctctataaacaaaacaatcagactttataataaaatcagtctatatataaaaaaagaggatgcccgtgggaaaaatgtgaggggcatcctctgtaaggaacagatatcgggaaagaagactttcacaagcattgctttccatctgttccctgtggggttatcttcactaacaagtgaagaaagggttcattgcagaagtccgggctttcacaagcacgggcttcctcttttacctcccatgcaggtccctcatacttttattaatagaatagaggaatggggtatatacccgcatgagaagtgggaaaatattattctgcaatacagacacttacccggttttcttcaggcacccggaaaggctgtactgtatctcctttaaaatccgtaacgattctgtccggcgctattcctttgtctttcaaggcatcggcaacaatcttcgcacgtttttctgataaagtcatattgattctcggattaccggtttctttgtcggcatatccggttatggcaactttgcttgccggatacttttccatgtatgccaccattgcatcgatcttcgattgctggtctttctggagaagtgcggagttcagagcaaagaatatattctgtttcataggttccactaccactgccacaggttccggttcgggctgtttcacgacaggttgtggtttaggttgttctactattggttccggttcataatataccggagctgttttcttatagctttttcctaatttgatgttcaggcccactaatacgttaaattgccagtcacagttgcctgcctttttcgagttgaatttgtcggacagtacatttgcgtttccttcaatattgatagccagccggtcattgaggcgcagatcacatcccagtcccatacgtccggctacaaggttttgtttgtcttgccacagatactccagttcgtgagatcttgtgtccagtgcgtttgcttcgtcgttgtcgaaagcatgattcaatcctacgccgccaaaaatatatccattgaatacacgtttcggattaaaaccacaaaataaagtactgaggtctgccataaggtccagattgccttgcagatatttgtactgataggtttgagaaggagtgacccatcctgcctttgcctgccaaccgcttacgcctaaacgggctccaaatgcaggtgcaaacttataccctacattgacagctgctgccggagagatcagatctgtaaaatcggcttcgcctactgtgtgagcagctcctgcctgtacttgcataaaccaatgaggtttgaacacagtcttgccttcttccttgatttgtcgctgttcctgagcgaatgctactgtgctgctgacagtaagtatggctattaataaatttcttattctcataattttatatattttatgtcttatcacagagtatgcagaatgtacttgttatggtgaaaagggtgcccttttctgattagagcacccttttgttattgaatgtctaagaattcattgacatttgcgattcttagttattcggattaactgtaatagtcaatgtagaagaagtagttccccagccgtaatttactgtagcaggaatgaatatctgataagtatatccaactggtgagctaacattcacatacttcacagtgttaccagtctgaaccaaagtagcgccatcaggcaacttgttaccgttgtattccaagcttgtagttactttgttcaaatccagtgttacatcgccgaacggaccatagaagaaccagtattgtccaggattccaatccggtctgccccactctttcttcgtccattcccaacatcctgagatctgtccgtaagatgttccttcgaatgcaggcttttcagtgtgtctgtgaggaaccattgtccagttaccttcaacccacttgtaagttgccggtacatagttgatactcttcacatagtcgtactcaatagtagtgcttgcaggtttagaaacttccgtatatataatatcgccatctaattcaacatgtggatatatcaacggccatccagctaatttctgtgcttcaagagaagcgtcaacttctgcctgagtcaagaactcttcagttgtgtaagtcttcttagtagatccacccaatctgttatagtatctataagtagccttacctgtatacatagtagtcacagtagtggtagtaaacttaatcgtaccatattctacatccaactgagccggtgtaaccatttcttcgtgaccttgaacatattcgaattcaggagtacaaactctcttccagtaagaatgaacattttcaacccatgaccagctatcttttacaattgcttcgtttctccagtcagtcaacagaccattccattggaagtcagcaacatcaccgccagtcttagcgtctattactgcaataccgctcggcatgttcaagttaacaggacggataaagtcaaccataaattcgttaacagtcacttcgtcgccattgctcatcgtgtagatgtgtgcaacgacagcttgcagaccgtttgcgctgttcaacgcagccttcacagcagcattgctcttatccagggtgatatagttaccgtcgatctgaacaccagacattacaggagaagtcaagttaccgttagagtaagtcttgattactttgtaacgagcagattcgcaacccggaagtcctttcacagtgtaagcagagtaagcttctgtcaatgctcttctgaactggcaatcacttgcaggagaagcaactgagttaggtacactcacatttacattgaagtacttgtactcatcaccatctttcgtccagtaaatatcattttcagtagcatccaaagtaagttcaggcaacttcacgtttacagtgaacttgaatgtgatgcttgcaggatattcagaagaagccagcttgttcttcactgttacagttgcaacaaattgagaaccaccggcaccgatcttacccagttcaccatgattaaatgaccatacgatcttcttcgtagcagtacctactgaagtatcaccgtcaacgattctcggcagagtcatagtgtgtgacaggttgttcttcttcactacagcaacagcaccggaagcatcatacaagttccagaattcttcgtggctcatgcttgtttccttaccgttagtaataacgcggtaaacattttcacggatgaattgctctgtgatagtgtattcagcagctgtttcagtacatttagctactaagtcataagccttgtcacctactacgaggtcatcttgcttcgtcacaccaaattcgatcttcacgaatccgcgacgtactacattgcctgcttcgtctaccaattccactttcaggataggagtacgaccgatcgcttctttattgaagccttctgcctggtacaaacctgccgcagcgtcgttacataccacccatttctgctggttggttgaagtttcaccttcagtgatgttgtaatcagaagaagctacagagaacttatatgacaacttatagtcttcgatcgggaattctttgtgattaccgttaccgaagcaagtagccaccaggtctttcaggttgaatacttgatcgtaaggagttgtatagcgaacagcttctgacttacaagcagtgaaagtagttgcataatgagcaccgtcagcacctgaaactaaagtagctttgtcagagatgcgaacgtccggtgcagccagtacgtcatcatagatagatacatacggagaagtaaccactacgttagtctcgtctttgtctacagcatcacccttcagagtagcctgcaaagcaaccatgtttactttatcttctgccggctgagtagaatggacgttaagacgaagcagtttgaagtccactgttcccgttgcagcgttagcaaccggagtaccgctgatctgaacccactggctggcagccgcgcgagtgttgatcactgtagcgctacgatccaagtagctatagtcagcattgcccaacttgaagctagccgggttgaagtggtagcttgcagttgccaaagcagctgtagaaatactataattcgtaggaatagcagcattttcaccgcttcccatcggagcatatttcaatgagttgaacttgatcgcttccacaccgtctacgatatagtcgggagcaaacgtgatgcttgtcagacggcaagtcatcaaagtgtgcaggctcaccaagtcagcgttgatagtaataatctggctgttgatggttctgatgtcaccctgaatacctgagatatccgatttgatagcatccagctcatcgttgatcttatcttcgaggtcagcaatatcctgagctgtagagttcttcagcgcttcaatggcagatttattctcaccgatcaaagctttcagaccgccttcaccgttgatttcatcccaaagtttcttaatctcatcctgtgcagcttcaatagcttcctgcgctgccgcgatatcttccttgttagcgtcagctatatcttttacaccttctgcataaagtttcaaagcgtcgagctgagtctgcaagtctttatctgctgtaatcaacgtttcgatagcatcctgagcatttttgatcgcttcggtattttctttcactgctccgttggcaagattgctcaaacctgtttcgataccttcaatctgagcaccgagtgcttttacagcagcttcgtgtactgtcacatccagtttgttgtcaatagcagcctgcattgaatttctcaatgcttcaacctgtgttgcggcttccgctatcgcatctgcttttgcttgcgcagcggcagctttcgcttcttctgccagcgctttcgctgtagcagcatcggcagcagcctggtcgccggcagtttttgcagcttctgcggcagtcttagcttctgcagcagctgtctttgcagcatcagcagcagcctgtgcagcttctgcagcactcttcagcgttgtcagctgagtctgaagatcgccaacggtgcttccgcttttgtcaatttgttcctgcagactcttgatgtcgtcatcgtagtctttacaagaagtaaatgtacctgccgaggacgctatcagcgctccaaacaggacagcatttaaaaactttttgttcataataaaaaacttttaatttataaattaaaaaaataataaaaatataatttctcacttttgattttaaatcccatgtgttgttccgttcatttctcgtgcgacctccttttcttaattcattcaacctttatttcccttatataatacactatgaagcatacgggccaaacagcctttacccgttactttctaggtaacgggtaaacctttgtcctgactcctgtggagctatctatatgaaaaaccagactattttacagtgaaacatatttacccctgtttcagacatgcggcagaggggaggaaattctttgtatcttgatcagaggttaacaggtccctaatagaaagaaatccgttgttttatcgtattatttctctttttttagtagtttatcagaaaaaatatcttttttgtttgcatgttttccaaaatatatccatctttgcaacgctatttagctccgttacctagaaagtaacagattcattttcaagctactactccagctattgaatgttttacaaaatcaataacctgattattagcctcatcaattttcttattacggaaaggttttagataagtctcggtcaccttgatggacgagtgccccatagcttcggagataatacccggatgaatttcgcaataataggctgttgtagcccatgtatggcgggcggtgtatgaactcagtctatcgttcagtcccaatacctcccccaagagcgtgagctgctggttgaagctgcgcaatgccaactgatattcccggtaagcctcctttgttccctctccgcttttcagcagtgagaagagatagggcgaatggctgtcgcggttcatatacttctttaatagttcgagcgcttccggagtaagcgtcaccgacaagggccggcctgtcttccgcctgcggtaagtgatcacgttatccctcaaatcacttttacgcagataagcgagatcgacaaacggcagaccacgaagcaagaacatcagcacgaacatgtcctgcgcacgcctcacggcaagaggtatggcggaagatgaaggcagtctggtgaataccttcttcatatcttcatcacacaatgccctcttatggtccgcacgcgtgcccgtataaacagagcggaacagatggggcgtataaacgaccatcctactgttgacggcacgattgtacaccgcacgaaatgttcttagataagtggaaacggtgttccagctacatcccttcccacgaaggtgtatctcgaaacctttcaaccactccggggtgacctcgtcaaaagaaaaatccccttccccacaataagcaatgatggcattggtgctgctgcgatatacgtgcgccgtaccaaagtttccccccatccgtagctcttcggctacttgcttcataaatgctactacttttaacattgtactcagtattaaatattacacaataaatatacacatatttcagcaactataattgcctaatacgcatatacacgaccaattttcagaataagacactccgaaaatcagtatcaccgaaaaacgaaacaacaaatagggaaagattgagttcatttattcaaattaccatgaataacttttcacatatagcgacatctattgatcactaaaaaaggacctttcttaaaaaaggaatatttaaacagtgaaagaagggcataattgtatcccactttaaagaaaggcataaaaatgccatcattcacaaatacaggattcctcttttttactattcaaagagtttatcggtcaaatcagaagtataattctttttcactgatcattctgatcgcttactgaagaaaaacagttccgaatgacacttttattttcccggtatttatggatcaattagaagaaaattaagcaaaaacagctttttcaggtctcccttaccgacggaaaacaggttggtcggtgaggaaggaggcgttggttttaaagaaacacccccttggtttaaaaccaaaagatacttttttgttttgaaaaggtgtatatttcatgtagtttcatgcaaagaatgtttttttttcgtatattattgcatttatttatgcagatttttctctggttcgttatttttagagcaactgtttttcaatgcaaccttaaaaatagcacattcatccgaatttcggatttcagaaaagagaagtaagtatataatagaagaagaggatgcatctcacgacacatcctcttcttttttcctgatatcttagtagacttctatttcttagtttttagaagcttccaaagatgctttgcggaattctttcattgctttttcgatttccaaagaagccttacgagcacgagttcctgctgctttgttaccgttttcaatctgagcgttagcatcttttgagaagtcagcatacagagctgctactttttctaccaattctttcataatccttttatttttttcgttaataatgtgtcgcaaaaatacactgtttcccgaaataaacgcataaaaacaatattttttttgaatttatctgcgaaaataagctaaaaaaagggcttttcaccatttttccctacctttgtagccatgaaaacgcttacagatacggattacatacatactttgatagctgaaggagagcatcagcaacaggacttcaaattcgaaatttccgacgcacgcaagattgccaaaacgctgtcggcttttgccaataccgacggagggcggctattaatcggcgtgaaagacaatggacgaatagccggcgtacgatccgaagaggaaaaatatatgatcgaagcggccgcacaactttattgcatcccggagatagattatactttacaaacatatatagtggagggcaaacaggtattagtggccaccatcgaagagagtccgcataagcctgtctatgcgaaagacgaaaacggaaaagctctcgcttatctccgtatcaaggatgagaatatactggctacccctatccacctgcgtgtatggcaacaaagcgacagcccgcggggagaactgatccgctatacggaacgcgaacaactcctgctcgacctgttggaacagggaacgctgctttcgctcaaccggtattgccggcagaccggtatttcccgacgtgccgccgaacatctgcttgccaaatttgttcggtatgatatagtagagcccgtattcgaaaatcataaattttatttccgaatgaaaaacgagtgatatattacgatttactcttttcaaaaacctaactatgaactttatcaatgaaataaatgatatactctggacatacatcctgattatcatgttactgggctgtgccgtctggttcagcatccgaacgcggttcgtacagttccgtatgcttcgcgaaatgattatattactcagcgagtccgccggaaaaggaaaacagggcgagaaacatgtttcatcttttcaggcattcgctattacgattgccagccgtgtgggtacgggcaacttggcaggggtggccaccgccatcgccatcggcggaccgggagctgttttctggatgtgggcgatcgccctgctgggagcttcgagcgcttttatcgaatctaccctggcacagttatataagatacgcgggaaggactcttttgtcggaggcccggcttattatatgaagaagggattgaaacagccgtggatggggatgcttttcgctgtgctcatcagcattactttcggttttgctttcaattcggtacagagcaatacgatttgtgctgctgccgaacatgcgttcggattcaatcatatggtgttgggaggagtgcttaccgctctgactcttgtcatcatcttcggtggtatccgccggatagcgcgtgtaagcagcattatcgtcccgattatggcattaggatatgtaggtctggcactggtcatcgtattacttaatatcacgcatctgccggaagtgatatctctcatcatcagccatgccttcggctgggaacaggcattgggcggaggtgtcggcatggcgctgatgcagggtatcaagcgcggattattcagcaatgaggccggtatgggttcggctccgaatgcagcagcgacggccaacgtcactcatcctgtcaaacaggggttgatacagacgctggcagtatttactgatactttattaatttgcacctgtacggcatttatcattcttttcagcggtgctcctttggacggttcctccaatggggtgcaactgacccaacaggcgctcacgaatgagatcggtgcttccggaagcatctttgttgccgtagcgctgttcttcttcgcattcagcagtatcttgggaaattattattacggcgaagcgaatatccgtttcatcaccgcaaagaaatgggtgctccacacctaccggatattggtcagcggcatggtacttttcgggtctgtcgccacactcgatttggtatggagtctggcggacatcacgatggctctgatggctgtctgcaacctgatcgccattatctttctcggaaagtatgccatccgcctgctctcggactatcgtgcccagaagaaagcgggcatccaaagtcctgttttcaggaaagagaccatgccggacatcgaaaaggacttggaatgttggtgaaaaccaacactttttcgtacctttgcggctcattaaaatctccacacacgatttgtaaattgtaaattataaaatagtaaatataacgatgggcttatttggtttattcaaaaagaaatccgatgaaacaaaagtcggcaatgtagaagatttcatatcactgacccgggtttatttccagtcagtcatcgctactaacttaggtattaccaacatccgctttttaccggatgtggctaacttcaaacgtttgttcaagattcctacgcagggaggtaagctgggactggcagaaaagtcggcttcacgcaaaatgctgatgcaggactacggactgaatgaaagtttctttaaggagatcgacagctccgtgaagcgtaattgccgtacgcagaatgatattcagtcgtatctgtttatgtatcaagggttttccaacgatttgatgatgctgatgggaaatctgatgcaatggaagttccgtatgccgtctatattcaagaaggcgctttacgggatgacgcagaagacggtacacgatgtttgtacgaagacggtgtggaaggctgatgatgtgcacaagactgcggcgactgtccgccagtacaaggaacgtctgggctattcggaacagtggatgacggactatgtatataatatagtgctccttgccaaaaaggaaccgaaaagaaagaacgacgacacggaaacgaaaaaataaggtcgcgtaaatgttagaaaatcgtaaagaatagcatagcaggaaaagcgggagtggcatacttccgctttttttattatctttatgtactttttcttttgccttgatgcaaaagaaaaagtaccaaaaagaaaaaatcaaggctgcgcctgcccggctactccggtcttatttccggctaaagggcagaaactcgcttcgctcaaacagtctgccctttttaacgccgtaaataagacctgcgcttgacgccgggcagtcgaggccgggggaaccttgcggagggataggtcgttactaatcaataaataatataataatatagaggatgcttatgaaacaaaagaaaatgcttgtacttactttttcgcagttgaaacaaatctacacgcaggagatgccggagttggtggagatggcggcggtgagtccgacagtggaggactttaaggctggtctgctaaaacatctggatagttgcgggatggttaatgaggttgcggaagaggcaagggagcaaattcgactcttactccagtatgatggacaggatgttcatgaactgtctacgggacaggatatttcggtacagacgatacggttgctttatcagtttctgacagagaagttggagaatatagagatgccgacggatttgtttctagaattgttccagttgttcaaacgtttgcaaggggaaagtgttcctttgccgtctccgcagcgcatcaagagccggaatgaccggtgggataccggattggatgaggaagtgcgggagatgcgtgatgagaataaggaacggatgctgcatctgctgattcagaagattgagaaccggaagtcgaagccttcggtgcggtttcattttgaggaagggatgagttatgaggagaagtatcagttggtaagcaaatggtggggagatttccgctttcatttgtcgatggctgtgaaaagtccggctgagttgaatcgctttttaggaaattcactttcgtcggagacgatgtatttgctgaatcgggcacgtaaaaagggaatgccgttctttgctacgccttattatttgtcgttgctgaatgtgacggggtatgggtataatgatgaagcgattcggagttatatactttattcgccacgattagtggagacgtatggcaatattcgtgcatgggagaaggaagatattgtggaggcaggaaagccgaatgctgccggatggctcttgccggacggacataatattcaccgacggtatccggaggtggctatccttattcctgatacgatgggacgggcttgtggagggctttgtgcatcttgccagcgtatgtatgactttcagagtgaacggctgaattttgaatttgagacgttacgaccgaaggagtcgtgggacagtaagttgcgacggttgatgacctattttgaacaggatacacagttacgcgatattctgattacgggaggcgatgcgctgatgagtcagaataagacgttgagaaatatattagaagcagtgtatcgtatggcggtacgcaagcaaagagcgaatcttgaacgtccggaaggtgagaaatatgcggaattgcaacgggtgagactgggttctcgtttattggcttatttgccgatgcgtattaatgacgagttggttgacatattgcgggagtttaaggaaaaggcttcagctgttggcgtcaagcagtttatcattcagacccattttcagacaccgctggaggtgacgcccgaagcaaaagaggcgattcggaaaattctttctgccggatggattattacgaaccagttggtatatacggtggctgcctcacgcagaggacatactacgcggcttcgccaggtactcaattcattgggagtggtatgttattatacgttctcggtgaagggatttaatgagaattatgcggtgtttgcacccaacagtcgctcaatgcaggaacagcaggaagaaaagatttacggacagatgactccggaacaggcggaagaattgtataagatactggagaccaaagtcagtgcaggtataaatgaagaaaaaccgaaagaagatgctgacaccgccaaacaaataagacggttcatgagaaagcatcatctgcctttccttgctaccgaccgcagtgtactgaatctgcctgctatcggcaagagtatgactttccaattggtaggattgactgaggaaggcaaacgaattcttcgcttcgaacatgacggtacccgtcaccatagccctattatcgatcagatgggacaaatctatatcgtagagaataaatcactggcagcttatctacgccaactcagcaagatgggggaagacccggaagactacgcttctatctggagctatacaaaaggggaaaccgaacctcgtttcagcctctacgagtatccagatttcccctttcggattacagataaaatgagtaatttagaaataagtaataggtattaggtaataggtaataaccgtagctactggttagtttatccgcatggcttaatacctattacttattacctattacttattacttcactctaattaccatattagcaacaattgcagttaaacctccggtggtgattcctgaagagaaaatacttcgaatcgcctctggagcttgttttaatacgtccggcattagttccacacccaaacctaaagataggctgactgctaagactagggtttctttgcggcctatttcctgtgaggaaacgatgcggatacctgctgccgctactgtaccgaacattaataaggtggcgcctcccagtaccggatcgggcatcagagagaatatagctcctacaatggggaataatcccagcagaacgagcatagcggcaatataatagcctacatagcggctggcaactcctgttaattggatgataccgttattctgtgcgaagatggagttcgggaaggagttgaatatacctgctaaaagagagttgaagccatctgccatcacaccgccggaaacacgtttcagataagaatcaccttcaatcggaagtccggaaatcatggagttggctgtcacatcacctgtggcttcaatggcagtgatcagatagaccaggccaatggcgataaatgaagagatattaaaatcaataccgtatttaaaaggttgcgggatgttgaaactcatcagcatctcgacatttagtgcgctcatatttacttttcccagggcgaaagccagtccataacccagacaaaggccgaacacgatggaactcatgcgcaggtatttgtttttgcagcgattgaaaaacaagacgctcaacaatacgagtgcagcaatggacagattttcccacgaaccgaaggagccgtcgtccatcgcgccatatccgccgccacaggaaacgataccgactttgatcagactcaatccgatcagtagtacgacaatgccggacactagcggggtgatgatattgcgaagatacttgaaggtacggctgacgaccatttcaataggtgcggcagctatacaggagccgaatatcaacggaagtccgcctactaatccggtcgctatgataggaccgataaaggagaaactggtaccttggatacagagcagcttcgctcctatcgggccgatacgacggcattgtataaacgtagatacccccgaagcaaaaagggacatagataccagaaagcttgttttttcaacatccagcttcagtgcgctcgcaatgataagaggaggtgtaatgatggctacaaagatagccaacagatgttgcaaggcagcaaacagggcatctttaaatggggggcggtcttctacgccatagatcaaatctgttttcattcgatatttttattcaataattgatgtatatccactggggaattttgtacttcgaagtttagttcagcgtccacttcaaagccagtgtcggaattacatagaagccgtcacgaccaccgaagttattgctcagttccacttcagaaccgacactcaggttaaagtttttattcactcccttgatgcggttcaggtttacccagaattgcggttcggagaggaagatggtttttccatacttggtttcttcacgccaccagtcggcaaaaccggagaaggtgagcaaatccttgcaaaagttcatgtaccatgttcctgtcaactggaagttattcggggatgggtgcttttgtatatatttgtacatggctgtcaatgtgaagcctctggagaaagaagcgttattataggtataggtggctcccgccaggtaagcgttgttgtaggaaaatcctttcgccagtccgccattgtattcgagatgggcggagaaaggacctttccagaatttcagttcacgggctatctcccagtaagcggaagcgactccttcggacgtatagtccatatcgataaagaagtaggtacttccccagttgtcgggatgaaacttctcgacagtggaggtcaacagcgggcgtcctttcaagtctttatcatacagggaacgtccgaaatcataatgtaactgaatgttttgtgcctgcaattccggtacggcagaaaacagcatacataggaaaagagcagaaatgatctttttcatgacaaatgtgtttaaatgaaggtgcaaaaatagctaaacctatacatatattcacattccgacactaaaattttaatccagactattatttcctgtatcccaccacaatcgggttcctccatgatcgggtccgcccaaagcctccacaagagccaggtattgctctctgtcttcggtttgcagcgtaccgggaaagttgagacgacgtaccattgtctctgtgtcaatacatccgttcttgctatggttgaagcgtaccggaaacaggcgaggatatcccgtgcggcgctgttccgcccatgcctcgcaaccttccgggaataaggcaatccatttctgcgtaatgatcttttccagctttatttccttgtcgtctgcgggattccatttaggagaaacccggcaacgggcaggaatgttattttcggagtcttgtgtgtcgatgaaatcggcagccgtccgctcactgttcagataatcgtccatctgataaatgccgtgttgatgaagagacgcctttattccgttcagataacattcttcttcatcttccggaatccatccgcgcaaagcagcttcggcacggagaaaccagacttcggcggagctcatcaaaggggcatccgtactctgatcgacggacaatttggataagcctgcataatgattgtgcgcaaagcaggttccctgacggatgccgcggtactctcctgcatacgccttgtcggtacaggtttcaaagtaaactttcaatcggggatcatcgtagcctgtcagaatagattccattgcagcgctcatataagtttcattccatacccggttgagctctcccaacgggttcgtgaatccggatttcgtagagactgctacccgttcagcttccgcttcaaagacaccaaattcattttccagtcccttccggaactcggcgcgtgccttatccggatcaaccgcagaaatacgcattgccagacgcatacgcaacgaattggcaaacttgatccaggaggaatattgaccatccagcaagatatcaaagcgggtgaatccattggagtcgggcttcttgtctatataatcggcaagagagacaacagccgaatcgagttcattaaagaactcatagtagacttctttctgcgtatcagggcgatattgattctgggcattcgcgaaattcttataaataacagggccgtaataatctgtcacacggtgcatgacttccactttcagcactttggtaatgccgaacaaggcaggttccgtatcacgggtggcattctccgactggtagatttgtggaaagatatacgaatacatatgtgtccacatggcgctgttccagccatcctgcatattataatccgagttatgcgtacctccgttcaagggtttgccgtcgtgcatataaccggagaacatatccgcgttcagattctgtatcaactggaaaggccagttcttgcctttaccgaaatcgtagttaaaatagatgccttgctggataatccccagacgaataccgaagccattgtcgtcaatcagcaaatcatcgtccgtaattcccgactggtcggtattaaattcacggaattttcctgtacaaccaacagaaaacagcagcatccccagcaagtatatataaatatgttttttcttcatcatcttccctcctgctcttaaaattcacatgtcaaagtaaagcccagactgcgggtggtaggcataccgaacacttcaattccctgattgtcattgcctgtagaaagtaccagatcgggatcgaaaggcgctttcttgtacagaaaacaaaggttgcgggctacaaaagaaagttgcaggtctttcagacaattcgttttctgtacccattttcgggggaagctataactcagcgatacttcccgcagacggaggttggtagcgtcatacatatagtattccgtcacgccggcgcgtccgcccactacatttttatagaatcctttgacatcacttatttgccggccttccagcgaaacatatcctttatcacgggcttgcgccgtcgctttcgatactccatagaggtccatctccgcctggggctgcgaaaggacttcacctccatagcgccagtcaagcaggaagtaaaggctgaaacctttgtaggagaaggaatgattccaccccaacataaagaccggattggcattgcccacctttacagtatttccatcgccttctaccaacggaagtcctttatagtctccgtccgttccataaacgatgtgcccttcttcatcacgtataaaggctttaccgtaaatatcgccgatagagccgcctttcactagtttcatcgcataactggacgagaagctggtaggtccgtaaacaaattctttcagttcttcatggagttctacaatcttgttcttattggcagagaagttgagagaggtcttccacgtgaagtcgggggtcagtaccggagtggcatccagcgttatctcccatccctgattccggatatctccggcgttgacgtatcgataggcatacttatcgcccgcaagcgcaggcagtttgaaaaactgctcatacgtgtcggtatggtaataggtcaaatttaatccgaggcggtgctgcaaaaacttccactctatacccaattcaacggaatgcgtcatctccggtttcatctcggcgaaaggggccgcatcgcttgccagtatctctccaccggcagtcacatacgaaacaggataggtgataaagggaggcaccccattgccaacgatactataagcaccgcgcaacttcgagaacgaaacccattcgggcatctttacccacttatccggaaggaaagagacaccgacggaaggataaaagaatcctttcttctcgtacttcgtgtaagccagcgtagacgaccagtcgttacgtgcggtcagatcaaggaagactccttctttatagccaatctgtgccgtcgcaaagaccgattgcagttggtaatgggcatctattttctgatcgatactggcagaactgctcatcacgatattggcaagattaaacacattggcatatttcaacgaagcattcttcgaatcaatgcgagtagagttagtgattctgtcattgatactgccaccaatggctacatccaatgtgaagtcattcagttgcttcttgaccatcgccatcacatctccgtacatctgcgtttcctgataatccatttcaatatagcgcccgttcatcccacagagtgccgtagcggtggaggcataaaatttctgacgcagtttatcggctgagtaatccagattgccacgagcctgaagtgtcagccaatcagtgactttcaaattggcagaaagggaaaggagcaggcggatacgtgcatccttactctgtatgcggttttgtatccaatacggattctgttcaaagtcttcggtaaaagtatgccagttttgtgtattcagctttctgtcctcgtcataacgctcatagttatctttataataagccaagtcctcgccacgaggaaagcggtatagacctaccagcggattcatataaaagcctcccgatacgggtttattcttcactgtctgcttcatgacattcacgttaccgtccagtttcagcctgctgttgaagaggacggcggtctctctcagattgatattgtgtttggagagtttattttcattcagaatgccgcgaccggtggtgttggcataggagaaatatgtttgcagcttgtcatttccggagttgacggatacagaagtgatcgacgtcagtccggtacggaaaaagtcacccaaattatcgtaaaccgtcagattttctttttctccccaactgtctgttacatcatttactccgtagctgttctgcatttcgggcagagagaaagccttttcaaaagtcagtccggtagagaaatgaatatccctccgtcctacggtatttcctttctttgtagtaataagaatgactccgttggccgcctggctaccatacaaggctgcggcaggagctcctttcaggatgctgatactttccacatcctccggattcagatttgagataccgtcgcctccgtccctgttaccggcatttgccgtaccgccgatagccgaataagcctgttccgaagtagaatttaacatgggaacaccatctatcacgtacagaggctgattatcaccggccaccgatcgtaccccacggatactgactttcgccgatccgcccatgccggaagagttcttgctgacctgcacaccggctgcctttcctgccaaagccgtgatcatattcacttctttcacacgattcagttcttctcccctcaccttttgcatggcataggccaaagaggattctttcttttcaagccccaaagcagttacaatcacgtggtcaagcagcagaatattttctttcagacatatttcaagcattgacctaccctttacactgacttcctgagactcgtaacctacgaaagaaatttgcagaacagcactatccggaacggataaaaagaaattcccctccacatctgtcactgttccattcgctccgcctttctctctgattgtcgctccgataagtggttcaccataggtatcgatgacccgcccccttaccgtaaaactggcagaggaaactttcacacattctttcgaccccggccgtgaagcataacaatcttcttcaaagaaagctaacaagcttataaaacagcaacttataattattcttgttttcaacagcatttcaataagttgtttttcaccatctccgtgcaaaaatagccaaatatttttaaatttgtttttttccgtaactattttgagggaaaagaatagattcgttatttttgtaggaaattacatcaatatggagattgaaatcgaaaaacatcctttagaaccctttctcccgccaaaagcaaagctgctgatgctgggaagttttccgccacaaagaaaacggtggtcgatggatttttattatccgaacctgaacaatgatatgtggcgcattgtcggactcttgtttttcggagataaagatcactttttgaacgatacgcggaaagcattctgccgggaacagattattgacttcctgaatgaaaaaggaatcgccctgttcgatacagcctcatctatccggcgtctgcaggataacgcttcggacaaatttctggaagtggtgcagccgacggacattgccgcattactccgccaacttcccgaatgcagagcaatcgtcaccaccggacagaaggcaacggatacgctccgtgcacaactggaagtggaagaaccgaaagtaggagactatgccgaatttgtgtttgaaggacgggcgatgagactctaccggatgccttcttcctcacgggcgtacccgcttgcattagataaaaaagccgccgcctatcggattatgtatcaggatttgcagatggttatttaggtaataggtattaagtaataagtattaggtattaatcgataaatagtatatagtatgacacctttatttttgcaatatccggcgtgcagtacatgccagaaagctaagaaatggctaatcgaaaataacattgagtatactaaccggttcattgtggaagataaccctacagtggaagagttgaaagcgtggattccacgaagcggattgccaataaagaaattcttcaacacaagtggtttggtatataaagagctgaaactgagcgagaagctgccttccatgactgaggaagaacaaatcgcattgctggcaacgaacggtaagctggtgaaacgcccgttagtagtgacagacagcttcgttctggtaggttttaagcccgatgaatgggaaaaattaaaataattggaaatttatttaccctaatatttgctggttcgaaagtttatactacctttgcagccgcaaacacgggagtagctcagttggtagagcaccggtctccaaaaccgggtgtcgggagttcgagcctctcctcccgtgcagaagtaaaccgcaggtaatcgtcgattatctgcggtttctcttttatagtccatagcttagtaattgcattgcagattctatttaaaatttatgcaaatcctaattcgttccacctaggttatcttttagttcgacccaggtgatcgtttagtcccacctaggtcgaacgaaagggaaacgtatatggaacgaactaatcaatgcgaaaccatacattgatctatgctgatcacccttttaattaacctatactattacttcttttccgctatctcccgtttcatccctttggcagtttctaccagacggataaattctcttctgtatcctttttcatcattattcagtccctgtttggcaaggccgatcactttatcatagcttgccgctcctttaaagtcagagtcccgaagcagctgaccgaacatagccacggcagaagcgaaacggaaatcggaagaaacattatttcctttattatccacaaagggaacttccatctttttgctgacgtccttgtccggagctttatagcgcagtttcacggtcagcaattcattagagccggtcggctgtactggctctttttgtttcttctgatatttcagatcatctacctttcctacgtagtcattcttcacgcctacgggaatcacttcatagaaagctgtcaccgtatgtccggctcccaattctccggcatctttggcgtcattattaaagtcttcgtctttcagcaaacggctctcataaccaaccagacgatatgcctgcacctgagccggattaaattccacttgcagcttcacgtcctttgctaccgtatgaagcgtagcgccaaactcacccaccaggacacgattggcttcctgcaaattatcgatataagcatgatttccattccctttttctgctaaagcctgacctttattgtctttatagttacccattccataacctagcacactcaggaatactccgctcttacgttcattttctatcagctgttccaaaccttccacagaagaaacacctacattgaaatctccatcggaacaaagaatgatccgattgtttcctttaggaaggaagttctgtttagccactttataagccagttggatacctgcgccaccggccgtagagccaccggatgtcagttcgtctatcgcatcacgtattttctgtttgtcactgcccggagtagattccagttttacgctggcgttgcccgcatatacaacgatggctaccttatctttttcacgcaggttattaactaatagcttcagagatgacttcaccagatccagacgggtaggtccccacatagaaccggatacatcaatcaagaataccagattagattccggaagtttgtcagtcggaatctcccttgctttcagtccgatacgtaccagacgatgatcagcattccaggggcaaacaccagcctccattgtaatcttcaccggatcgcttccggtcggcttcgcataatcgtaggagaaataattcactaactcttctgtacggatagcatcaggcaccggcaaggtaccgctgttgatcatacgacgcatattactgtaagaagcggcatccacatcaatagagaaagtagaaagcggagattctcctacctgcttaaaaccattttcactgattgatttatattcttccgtatttactgcatccatacgtacggacgggtgtctgagacttgccagattgacggttgatatgacgccggtaacagctacctttcgctggctgccgtatccgacgacaacacattcttccaaaacatcagaactagccataaggcttacgtccatctttgcagagaatatgattttttccactttctcaaaaccaatatagctgaagataagagtttcccccttgtttgcttcaatcctgtactgcccttgtaggttcgtaacagttccacgggatgttcccttcaccgtcaccgcacatcctaccaacggcgaaccgtctgatccgtccgtcaccgttccctttacgatcaaaggctgcgcccataccgtaccacccaatgtagtaatcactaacatcaccgtgagcatcattgctctgagttgatttgtcttcataactttatctttttaatttttaaaatgttacaattaatccgcttttactatagagatgcagattccacacggattccataaaccaactgaagttttttttatttttcttccacacgttgctatttttaattcctatgcctatctttgactgcaaaaaaaagctgtgttctttaaaagaaacatatcgaagctatcggacgaggaactactgacccattatataatgtccgaggatacggaatatttcggtgaactatacaaccgttatatcccgctgacgtacggactttgcctgaaatatctgcaagatgaagaccaagcgcaggaagcggtgatgcagatgtttgaagacctgttacctaaaataatcaattatgagataaaagcattcaagccgtggctctatcgggtggcgaagaaccattgcctgcaactgttacgaaaggaaaacaaagaaattccgctggattataccattaatattatggaatccgatgaatttctgcatctattaagtgaagaggaaagttcggaagagcagctgaaagcattgcaccactgtctggaaaagctgcccgaagaacaaaggaccagcattacacgtttcttcctggaagaaatgtcgtatgcggatattgtcgaacaaaccggatttactctgaataacgtgaaaagctatatccagaacggaaagcgaaacttgaaaatttgtattaagaaacaagccctatgaaactattggactacatacgaggactccgcaaagggaaagaggcacatcgactggaaaaagagtcgatgaaagacccttttctggctgacgctatggatgggtaccaccaagtagaaggggaccacgatgaacagattaataaattgcggatgaaggtaaacgcccattcggcaaaaaaaagaaatacgtatgccgtcacctggagcattgccgcctgcctgattataggaatcggaatcagcagttacttcctgtttctgaaacagaacgttggagaggatgtgtttatagctaaggagcagcccgccgccactgcaactgttcctgctcacaaagaagacacttccctatccgctccaaagatggaaccggattccggtcgcccttctgccacaaaggaaacggtcggaaaagatataatcgccaagacaaggcaggattctccatcccaaagtacaccttcgagggctacttccgcaacggttcctaaagcgacggcttctaaagcaacagctcccaaagcaacgcctgccggaactccgataatggaagaaatagttgctccggcagaggagctggaagaagcggctatcacaacggttacagatacttctttcctggatgccaacaggaaaaagatgaaagtagctcaattagccacccaaatgaacaacatgatcaaagggaaagtgacggacgacaaaggagaaccactcatcggagctaacgtcacttacaaaggaacaacttatggaacgataacggatatcaacggagaattctccttgcccaaaaaggaaggtaatgcgatattaactgcacattatattggctataatccggttagtataccggcagacaccagtaagactatgctgatagccatgcatgaaaataaaacaacacttaatgaagtcgtagtaacaggatatggcacacagaaaaaggtagctgtgacaggagccatttctgccgtatcaatcaaagatttgaaaaaagcttcgggtgcattgcagaaatcagcaacatcaaaagatgctgatatttcccaaaagaccgatacattacagggggctgtcattccggaacccgtaacaggaatgaagcaatataaaaagtatctgaaaaagaatctggcataccctgcggatgacacttgcgcagaagtcaaaggcaaggttaccttgactttctttgttaacaaagaagggcgtcccttcgacatcaaagtcaaggaaagtctttgcaaatctctggataaggaggccatacgtctgattcaagaaggtccggactggacttacggaaaccaatcggcagaaatcacagtgaaattccacaagtaatgtggccggcagagttcttataagagctgattttttatgaattagctttcttataaatgatgaatacaacaagaattatactcactttaataagaaaaagttctcaccacagtgagaattaattctcataggcttgagaatattttctcattgcaatgagtatttttctcactgtggtgagaattttttctcattgcgatgagaatggtttgagaataataagcgcctgtcagtcgttataagagtctaaatccaagttcctttacgccacagaaattccaacggtccttgtttatgacgggcaagccaccagcggctgaatatcaactgaatagtgaagataagcaatgcaatcagcaggcttcccgttgctcctgcatacttgtacattgacagtccgaatccgtaatagatggttactcccatgattgactgagaaatatagtttgtcagactcatgcggccgtaaggaatcagcagactttgccagttatatcctgtgtccttcttaaaccaaagcaaggtaaagacagaaacaagaatgaccataaaagcaaagttggcataagacggaacagcaatcttatacgggaccattatagacgggtttgtaatcaaagcgggtataaaagttttcaagcaatagagagggataaatgcaaggatggcacctgtcagcatcttcttccaaaaacgcagggactcttcgcttttcataaaatacttccggcgtcctaaaagcattccgaacatgaataaagctgccgtctggaacaggcgaccgttttctacttgccaaatattgctatacatctgtccgtcagtgatattggaacggagtacttcaaagaaactaccattggatgtcacttcctgagcaagttcgaagtaaggaataaaatgtcctgttgacggtacatactccgaattgatcattgcatagatggcacgcccccattcataaggttgcaaaagtaagatggcagcaatccaaaagaccgtcttatctttgagcttgcaaacaggaatcaaggcaaagccgactactgcataaagcaaaagaatatccccgttgtagaacaaggcatgtaactgtgcaaacaggaaaagcaggcacatccgccacgcaaatcgtccacggaaatctgttccgcgcttttccgcattatgaaactggatatagaaactaaatccgaacaacaaagagaacgtagcatatgccttccctgcaaacaggaagaacatggtatcccacgcatacttatctatagtctgcaaccatgccggtaacgtataatccagcggtaaaaacagattatagtgttcaaggttgtgcaacaatacaatagccagcagggcaaatccacgcagagcatctactactccgagccgttcagtcgttttaagtgtttgagtcatcagatatgtttattcaagattactaattaggcggtaaaaatagtagaaatatctgaagtacaaaagtttataaatattaattatatcaactcatagcttgccatttgtatcggcatatccagattatgaagtaccttttccagtagaatcccttctctgttgtcatactcatagccgaaggttgcccgaatcccttgcagaataaactgggtagcacggtccaacgccatcggaaggctgtctccctgcatcaaggagccggtgatcacgcttgtaaaagtatcccctgtacccggatagtgggcaggcagataagggcaagtcaccttccaatagcggtttccctgacgattgtaggcatatacagaagtcttatgaggctcatcgtgcactggaacactggtgataataaccacctgcggacctttgtcggacaagagacggagatattctttcagttcctcatccgtactatccgctttatacggttcgtccagcaaataaaacagttctgtcagattcggtgtgatcacatccgctttggttatcagatgacgcatttctttcaccatctccatatcaaagttggtataaagccggccgttatcacccagcaccggatcggctactatcaaactatccggctgacgaaaatccttgatgaaatcggaaacaatctgaatctgcctcggggaacccagataaccggtataaatggcatcaaactgaacctccagttttttccattcggctatgatcttcggcatttcatccgtcaggtccagaaaggagaagccgggatactgcgtatggttggacaatactgccgtaggaagcggacaaacctgaaaacccatagaggataagataggaataacgactgtcagagaaacacgtcccatccccgaaaggtcatgaacggcagctatcttctttactttatttgcatacatactgttttttattatttagacgattatagttctttccatggatgagacagaaaacagaggctctatatatcaacaacaaaggctctgtttcctatcaacagagcctttgtttatcttatacagaagctccattttttctttgtcctaacaaaactaagcttctattgttttaaatccaaatttattttagaataataaagcggagttacgtcaatatgaccaaaacttcccgtgctccatgcgctcccatgaccaatgcctgttcgatgtccgccgtctttgacgggccggaaataaaggtaccgaactgatattcctgtccgtccagtttgcgataagcgtcgtacatggtatccacaatcttattccggtcgatcagaatcaccagtttctccgaaataaaataaatcgctttgtacttcacggtttgcggtatccagacagcgccgttctccgctactccgatctctccccgaataacggctacctcggttccgtccagttctttcgggtcgtccaccatatccggattgaaagttgcacaagatatatccggcaatacggaagcaatgcgcatcgcatccggatacgtccggcgaatgacggcattcacatcttcgccttcgcccaataccactgccgtaccgcctaccgcacggctgatagcgcaaaattgctccattttgtccggatacgtcaaacgtttcatatctgctatatccggtttttcgtagcgtgtctgcgtatgcttacggatgctcgccaatatttcttctctgctgctcattttgattcctcctttccctgtacctcgtttttcttccacatttcgttgaatgactctttggcaaattccggcagttcgcgtcctttgccccaatcgtcaaagtcattgtatttcataaagcgtggcaggccgttcaccatcggagccgcccacaaagccgcattgaacaatgcaggacgctccatcaggaacttcatgccaccggacattatcttctttccggtattcgcctttcccaatccgtcaaggtcttgacgccacttgtaaatctgttctgccaaatccacttttaccggacagacatcggaacaggacatacacaaggagcaggcggaaagattatcataatacttctccggatcatgagccatccccagattgataccgatagggccgggtataaagtaagtgtaggagtatcccccactccggcgatagaccggacaggtattcatacaggcaccgcaacggatacagtttaatgtcttgatatggtcgggcttggaaaggatcgtactccggccgttatccacaataataatatgatattcgccaccttcacgcggacggcggtaatgagaggtataggtagtcaccggctgtccggttgccgaacgtgccagcagacgggtgaacacacccagcgcatccagatccggcacgatcttctccatgccgaaagcggctatattcagtttgggataagaagtacccatatcggcattcccttcattggtgcagactacaatgtctccggtagaggctacggcaaagttggcgcccgtcatggcggcttccgcattcagaaagaggtggcgcagattcttgcgtgcggcatgagtaaggtaggtcgggtcgaagtttcctttttccgtacccatctccttttcaaacagttctcccacttgctcccgtttgatgtggatagcaggaagaacgatatggctcggctcgagatgcatcaattgcagaatacgttcgcccaagtcggactctaccacgtctattccgcgttccatcaagaagggattcaacccgcactcttcggcaagcatcgacttgctcttgatgaaatgatgtacattatgctcattcagtatttcgtacacaatggcacaatattcgtccgcatcttttgcccagtgcacaatcgctccgttggcagtggcgttcttttcaaactcttgcaagagctcttcgaggtggctgttggaataaagtttcagttcacaggccttgttgcgaagctcttcccattcgggaacttccttgctcatcttgtcccttttggctcggaccatccaaagggtttcgttatgccatgctgccatcttgctgtcctgcaagaacttttcggcagcctttgaatgtttggtactcatgattgcgacgctaaaatttcgacaatgtggataatttgaatcggcagatgctcccgtttgatcacaccttgcatgtgcatcaggcaggaactgtccgctccgacaatgtattcggctccggtagccatgtggtctttcaccttatcacgccccatgcagacggacaccgcctgctcttctacggcaaacataccgccaaacccgcaacattcgtctatatggctgggctcgaaaacttcgatgccttcgaccatatcgagcagatcgcgcaatttattgtaataagggatatttaactcactgggagcggaaatcaagagctcgcgcacaccgtggcaactgttgtggatgctgactttatgcgggaagcgtgcgggtatcttcgtcggtctaagcacatcatggataaactcgcagatatcataaatcttccccgcactccgacagacatgcccttctttttcaaggataccgggatgattctctttcacaaatgccacacaactggcggaagggccgacaatgtaatcgtactcccggaacagatcgtcaaaacggagcgccagcttcatcgattcatcttcaaaaccggcattcgccatcggttgtccgcaacaggtctgatccaacggataatcgacatctactcctaaacttttcaatagtttatacgatgctacccccacattgggataaatagcattgatataacaaggaataaataaacctactttcataattatattacgtaaaatttagatgcatcctctgctactacatccgttttatctgcttaccggatgtcgattagtttgtgcgtttgcaggcttagtctccatttaggatgtcgcattacacagtccactgtcaaagcagtgttattacaagaacaaggctggaggaaaaaatgttcagcgggaagcagttcataaatacttatatcttgcccttcgtagacaactttcacttcatccatccgggtaatccctaatttgacaccctgcttgggcgaacaggtcacccagtcgacggactccggcagcggtcgtgtgccgttggtttcgatacaaacatatttacccgcttcgtgcagacggtcgatcagtgcgtcgtctatccagagcgaaggttctccccctgtgaggataacggtaacggcgggatatttgctgacttcggctatgatttcgtcgtcagtcatcaaggtgcctgcttcgtgttgtgtgtcgcaaaagctgcatttcaggttgcatccggagaaacggatgaagactgccggagtacctgtgtgatagccttcaccctgtagactgtaaaagatttcattaatctttctcatcatttgagttgttcttaaatttctattgtctattctgtctctcctgctgccggagttttctcgtttgccgcagcatctttctcgtagatgacaatgtttccttcggactcctgcacttctactttataacattgcggaatctgcttgcaaacccatcgggcaatgttttctgctgtcggattaaatggaagtacttcattcagattctgatggtccagtttctccgtgaccacttctttgattcgggtaaaatccaccaccattccttcggaattgagccgtgaggaacggcaatagacagtgataatccagttgtgaccgtgtagactggcgcatttactgcgatacgggagtaccagcttgtgagaagctgatatctccatgcgtttgattactgtaaacatggctgtatgtatttattatagttacatgcatctaatgtcacctcgatgcaaggacaaaggtaatataaaaagagctttcatccagcaaacccgattattttttcctgtttttacactatctttgccgaatgaaaactctttatattgttttaggaagcatatctctcggactcggcattctcggcatctttctgccgttactgcccactaccccttttctgttactgaccgccgcgctttatttcaaagggtcgccacgattatataactggttgctgaatcaccggcacttcggtccatatatccgcaatttccgggaaaacaaggcaataccgctccgcgccaagattatctcccttgtgctgatgtggggaacgatgctctattgcatcttcttcctgattccacttctatgggtgaaaatccttctgggactgatagcggcaggagtcacctatcatattctttctttcaagacattgaaatagttcgaaagtccctgacgggcgtcggcaagtttgtcctcccaatgtttcacggagttttgtccgataatgtcggtcacgtacttcacagaaacaaaaggaatctctttggaacggcagacgaaggcttgcgcatacgcctccatgtcgacgacatctccgcttacgtgagtcagctccgtcaggaaaccatctcccgtattacagattccctcttccgtccaatgcttgcagaagccttttgtttcaagcaaagcggaagaatctatttcgcattccaaacctagtccggctagtttctgcatatcgcggtctataaatttgcggcagacaaagatatcccctacctgatgattgactgttcctgcacttccgagattcaaaacgagatcgggctgcacctggcggatcgcttctgccagatgaaaggcggacttcacttttccgatccccgtacggatgtaataaggctctacatcgggccactttatctctacaaattcgccttgaacggcatacgttactaatattttcagcataagttttctgtataaaaagacattaccacatgcaaaaataagcatttatacttgaaatggtcagagattgttctaaaatgatcagtttttaatgatggttgcttccacagttcgctaactttgcctacataacttaaaaacaaaatatcatgactcaaaactctattgcggacaaccggatggtctggctggatgttgtccgttgcgtcgccatgctaatggtaatcggcgtacattgcattgaccctttttacatttctcctacgatgcgcgttattcccgagtacacacattgggcagccatctacggttcgcttctccgcccttcggttcccttattcgtaatgatgaccggattactgctgctaccggtcaggcaacagcctttaggcactttttataagaagcgcatcttccgcgtacttttcccgttcctcatctggtcggtactttatagtatgttcccctggttcacggggctgctggggctatccaaagaaatcatcggcgacttcttctgctatacccagggacatgagtcgcaaagcctcatcgattctctgaaagatgtagccatgataccgttcaacttcagccataaggagaaccatatgtggtatatctatctgctcatcggattgtatctttatatgcctttcttctctgcatgggtagagcgggcaagcaataaaaccaaacaaatattccttttcatctggattgtttccctgtttatcccgtatatccgcgaatatgtagccaatatgcttttcgaccggagcggctatgtattcggcactgacacgtggaacgagttcagtatgttctactactttgccggattcaacggctacctgctgttgggacattatctgaaagaaggcggcaacggaaatgcactaaaaattttctggccttttagtggttcgccaaaagatgatcgtcttactaatgattggagtgtttggaagacattcctcatttgtgccgtgatgtttgccattggatattatgtgacgtacacagggttcagcacaactgccgccaacccgaatgctacggagactgagatggaactttacttcacattctgtagtccgaacgtgttgctgatgactttagctatgttcctgatgttgcagaaagtagtaatcaatacacctgtcatcgtcaaagcattagccaacatgaccaaatgcggttttggaatttatatggtacactactttgtagtaggtccgttctttctgctgataggtccttcggaaattccaattccgttgcaggttccgttgatggcagtttgtattttcctttgcagctgggcattcaccgcactactatataagctgatgcctcacaaggcaaagtatataatgggataaagaaactaaaaaagatatacgatgaaaattaaagttggtcttattggattcggtcgaatgggacgattttatttgaaagaaatgcagaaaagcggaagatgggaagtcgcatacatttgcgacattaatcccgactgccgcgaattggcaaagcaattatctcccgaatcgaaaatactcgaaaacgaacaggaaatgttcgatgatgaaagtgtgcaggtggtcgggctctttgcgttggcagactcaaggcttgaccggattgaaaaggctatcaaatacgggaaacatatcatctccgagaaaccggtatcagacaccatagacaaagaatggaaagtagtggacatcacggagaaagccagttgtttttcaaccgtcaatttgtatctccgcaacgcctggtatcatcaggctatcaaacagtttatcaatcagggcgagatcggcgaacttgccattctgcgaatctgccacatgactccgggtctcgcaccgggcgaaggtcacgaatatgaaggccccgccttccatgactgcggaatgcattatgtagacattgcacgctggtatgccggatgcgaatacaagacatggcatgcacagggcgtcaatatgtggagttataaagacccttggtgggtacagtgtcacgggacattccagaacggtgttgtttttgatatcactcaggggtttgtgtacggacaattatccaaagatcagactcataactcatacgtggatatcatcggtaccaaaggtatcgcccgaatgacacatgacttcaagacagctgtcgtcgatctgcgtggagtgacacagacccatcatatagagaagccgttcggtggaaaaaacatcgatgtgctgtgcgacttattcgccgactccatagagaccggaatcagaaatcccaaactaccgctcatacgtgattcagccatcgcatcggaatatgcatggacctttttgcacgatgcccgcacgcatgaccttcctgccatcggtgaattgaaaacacttgagcaaatatgggaaagaagaagaaatatgaaaaatggatacggattactccgaaaaccataacgaacattcaataaaacaagaaactgaaatcaattattaactcttaaaaataaaaccatgtcagacttttcaagaagaaaatttcttaaaacgggagccgctgctttagcaggaatcaccattgctcccagttctattttaggtatgagccacgggcacgtttcaccaaccgacaaactgaacctcgcagccgtaggtatcggcggtatgggccatgccaacatcaacaacgtgaagggcaccgaaaacatcgtagccctttgtgacgtagactggaaatatgccaaaggcgtattcgatgaattcccgaatgcgaagaaatactgggattaccgcaaaatgtacgatgaaatgggcaaatccattgatggcgtaatcattgctactgccgaccatactcatgctattatcacagcagacgccatgacaatgggcaagcacgtatattgccagaaaccgttgacccactccgtttacgaatcccgtttgctgaccaagctcgccgcctctaccggagtagttactcaaatgggtaaccagggagcatcgggcgaaggtaccgacctggtttgcgaatggatctggaatggagaaatcggcgaagtaaccaaagtggaatgcgccaccgaccgtcctatctggccgcaaggactgaatgcacccgaaaaggcagaccgcatccccaacacactgaactgggatcttttcaccggacctgccaaactgaacccgtacaacaacgtttatcatccctggaactggcgcggatggtgggattacggtacaggtgcactgggtgatatggcctgtcatattctgcaccagccgttcagagctctgaagctgggttatcctaccaaggtggaaggttcttctactttattactgagtgcttgcgctcctcaggcccaacacgtgaagatgattttccctgcccgcgacaatatgccgaaagttgccttgccggaagttgaggtacactggtatgacggcggtatgatgccagaacgtccgaaaggtttcccggaaggaaaacaactgatgggccccggtggtggtctgactattttccacggaacaaaagatacattgatttgcggatgctacggagaacaacctttcttgttgtcaggccgtgtgcccaatgcaccgaaagtatgccgccgtgttacttgttctcatgaaatggactgggtacgcgcttgtaaggaagacaaatccaaccgcgtgatgccgaaagcggatttctccgaatcgggaccgatgaatgaaatggtggtaatgggtgtattggctatccgtctgcaaggattgaacaagacactggaatgggacggcgctaatatgtgcttcactaatatcggtgataacgaaacactcagaacctgcattaaggacggatttacaattcatgatggtcacccgtcattcaataagacctggacagatccgatcaacgcgaaacaattcgcagccgaactggtgaaacataactatcgcgaaggatggaagttgcctgatatgccacgataacacgataaaagtaagttaagaattaaagattaaagattaaaaattaaatagttattattatgaagaaagtattttatccattagcttgttgtcttgcagcgggagttttagtttcctgcagcggtcagaagaaatccgggagtgctcaggaagagcaatcggcaaacgaagtagcattatcatattcaaaatcattaaaagcagcagagatggatagcttgcaattaccggtagatgcggatggttacatcactatctttgacggcaaaacatttaatggatggcgtggttatggcaaggacagagttccttccaaatggactatcgaagacggttgcatcaagtttaacggttccggtggcggtgaagcgcaggatggcgatggcggagacctgatctttgcccacaaattcaaaaacttcgaactggaaatggaatggaaggtttccaaaggcggtaactccggtatcttctatctggctcaggaagtgacttctaaagataaggacggtaacgacgtgctcgaacctatttatatttccgcacctgaatatcaggtattggacaacgacaatcatccggatgcaaaattgggtaaagacaataaccggcagtcggcttctttatatgacatgattccggcagttcctcagaatgcgaaacctttcggcgaatggaacaaggctaagatcatggtttataaaggtactgttgttcacggacagaatgacgagaatgtactcgaataccacttgtggaccaaacaatggactgaccttttgcaagccagcaaattcagccaggacaaatggccgttggctttcgaactgttgaataattgcggtggcgaaaaccacgaaggatttatcggaatgcaggatcacggtgatgacgtttggttccgcaatatccgcgtgaaggttcttgactaatgtaatatatcatgaaaacgaactatttattaatcttattcgcattgctgctggcaattccgcaggcagcagatgcaaaaaagaagaaagacattgccatacaactctattcggtcagagacatcataaataatggaaccgacctcaacgtagttttgaagaatctggcgcaaatgggatacaccagcatcgaagccgccaattatgataatggcaagttctatggcaaaactccggaagagtttaaaaatgctgtcgaaaaggccggtatgaaagtactgtcttcacactgttccagaggattgtcggacaaggaagtggcttccggagatttctccgagtcactgaaatggtgggatcaaagcattgccgctcataaagcagcaggcatgaaatacatcgtaaatccgggaatcggtgttcctaaaacaatgaaagagatgaagatgtattgcgactatttcaatgaaataggcaaaagatgtcaacagaacggtatgaaatttggatatcataatcatgcgcatgaatttcagaaagtagaaaatcaagcggttatgttggactatatgattgagaataccaatcctgagtatgtcttttttcagatggatgtatattggatagtcagagggcagcacagtcctgtggactatttcaacaagtatccgggacgtttcaccgtgcttcatatcaaagatgacaaagaaatcggagatagtggtatggtcggattcgatgctatcttcagaaatgcaaaggttgccggcgtaaagcatattgttgctgaaatagaagggtacagttgtcctgtagaggaaagtgtcaagaagagtttggattatttgctcgatgctccttttgtgaaggcgtcttatagtaaatagaagtaaatacagaaataaggaaacagtaggttcacgcatcattgcttgagtctactgtttttttcttagtactgcccggctattattctgaaagatatgcgaagtatttatataccagatcatcgatggcactataaaagaaaacttcttcaaaactacatgaacttattattagaactgctaataataaggcaggtatcacaatatgtgtttgggaaagttctaatttttaaaatattagtttgtaaacttgttaacaaagacagaattatcttttaaccaggctgctgtaaagaaaatggggaccccaaaatcatttggactgatatcagagtttatataatccagtaggtactccaaagggttatccggtgttatgttttcattggcaagaggatccaaaattagtcctctgattattgagctagccataattgatttgcttttttctgatatatctcccttcttggtagtggatttatttaagatctcattcaacgcaacctttacatcctgataattaagatccgattcaacaattagaattgatcgtcttccaaattctatagaaccaacataaataagttcgcttaattgctcttggactatcggagagttgctcagttcctcctcaggcatatccatagcaatggaaaaataactctgactaatatctaatactgccactgttttatgaattggattaggagatgttattttgaataagtcggatagatctatttcctcaccgaaaaataaagctagctgttcataagaatctatctgcttcaacgtaaatgaaaactgatagttaggtttcaatacattattttcttgcagcttttgctgaacagccctaagcatattatcgtatgaaggtataatcgtttcggattttaaaggcaaactatagctaattgtaataggattcattggcacattaagaagttgatgtagaccgttaacatcattcgctttcataataccgccaataaatacctcataagggtttttgaccgcaaacttagttgacgtatactgattatgttgagcaaaactgctaacatggagaatagaaaagaaaatgatatatattattactgctttcatgttttctatattaaagtttaacttccgggattaattcaaatgtgtactgtactcttagccacgccacctgattctttagattgttactgtttccacccaaatatgtaaccaattcggaatatgataataatgaatatttctgccctatcaccgataatgaaccatgcatattgttatcctttacccaaaagaaacctgtattaaggataaatgtgatttccccatctttacttccacaatagtcccatatgccagtaacgccattgtataaatataaatcacccttattccattcggctttatactcctgaattaacccgcctcgtttgatgattgatacagaatcatttttgaatataattttttcaggttgaaacattgtcacacgatccccaaaatacagactggacttatcaatatctactaccccaggttcctgtccagctggtttatactgtaattccacaatattcatggatttcgggtaatagctcaaaacgtttattgatggctgctcaatgatcttatggttatcatcagagcaagatgtagccgcaattgacacaaacaatattaataataaagaatttaaataccgcaatatcactttatcgcaccctataatctgccggcattgcctactttggcttactgaaaaaaactcaagtgtatttttagatatgctatctaatgttactaatagggataatggtgcttttctttttatcatcgctaatatttttataataagtatattatatataatattttatcctgactaaatatgttttgtttgcagggtttacctcacaaacatataaaaaacaggaatgttctcatacaaactcaatattactcccaaaaactgagatttaacactttcagtatatttgaatctctttacacaaccggacctaaaacggcttaaataaggagcaaacttaccggatttgttgatataactgagatcaaaaagcaatagcaagacgactacccaactgagatttggccaagttctgtttaatttcacaaaaaaatagcgcatctcgaacgaacgaagtacgctttaatatttagctatagaatttccgtcactctgaaagatatgcaaaatatttatataccaaatcatcaatagatatttcattttgcttgaatcttattttatctaatggagtaattctttcttctaaatttttccgtcctttataaactgtcagaatataatcttttccatcacgattagtaagcgtagaatcgctaaaatcgcgcatttgggaatcagacttcacataattcaatatgtatgatacatccctgacacgtccttacacaggagcaaggatgcctttcgccactaaatctttcacatctctgttggcggtatctaaaatcatccgtatagtaatccatatcgggaattctcatcatctcaaaatccgaatgtccggcagagttattctgttcgatagtaaacgtataactgctactcagataacgggaaacaagtgcataaaaagaataacgaataaagttctcatttatttataggatatatagccaatatgcagatgatatacaatctgcgtattggcattaattaaatactttaactacatatttgagtttgcaagcatactcattggttttatttgcgatgcatgattagaccaactaggagctgctttatatgcctcaactgactcatccggaacgtacatctcactaaatggaccatatcctatatatcctgttcctgttattacaggagggattattgctttgcaaataaaagtgggataccacccattcccatgtaagaaactatcaccaatttcagtaatagttgagggaaagattattgtatctgctttaatcgtccaactaataaacccttgaggtatactagtcctaccttcttccacttcaatataagtcaactcgctacagttactaaaatgtccagtgctaataaacacccaacttgcaggaatatataactcaccttgtattccagtatccgcaaaacatctataatttaaagtggaattattaggcaaatttattttatttaatgttcttagtccagaaaaagcagcttctccaatggtaatttcttcaacatgtgataggtttaaacttgtaataatagtattttgaaatgaactattatttatattccttgtttttctactaaattccaccgattttaatgagatacaacctctaaatgcttcatagggaacagtctctaaactagtgatatcaacagattcaattccctgacaaccgtaaaatcctccacttcccatacttgttatccgacttaaatcaagatgcccagataatgaaatacattttctaaaagtattactacctaatgaggtaacatatttggtaagtggtaattctgtcaatgaactacagttttcaaaactattcttctttatttctgtaatctttgaatttataggataatgacaatattctaaagaagtacaatcattaaacaaatagtctccaatttttacaattgaatcaggaagctctatctttcttaaacttgggcaattactaaatacagtacctcctaattctattaaatcaataccttcttcaaataaaacttctgttaagtttaaacactgatcaaacactgaatttttaattgctgttaagcttttgggtatttttattctcaaaagtcctgtatttcgtaaactttgtattgataacatttgtatattaggaggtagaataatagaaactaatttcgtacaattgaagaaagaatatagatatagttcagaaattgatgtaaaatactgtaattcatcgaaactagttatttcttcattatctctaaatattttatcagaaataactttaatgctttgaatctgttgttttgtaataccaacaccatctccatacaaatcaataaaataattgcctattaccgcatccttgaatctcacataaaaatcaccattgatattcagagtcagcttcttaaacgcatttctcaaaatctctatcgaatcctcatacgcattagtattaatcgtaattgttccatccaacaccgggtattcatcttctccggctaatccttcagagcttaatccctcatacgtaccgttcgagagtgttgctaacttatccaacatatctgaatcatcatatgtttcatcaaatcctacagcacggatacgtttcagtttatgatcgccaccttgcccagtttgtgcatccattatactgaccagcaattgcatcggctttactttcggacatccggttataaagaagtcagtaatgatctcttcacataaatcgattcccaccccttcatttgtcattaacggatagtttgctaaagacaaatattggttgtaagcactaaactctacagaccggagtcctccaccctttggaagaatgatttgtacaagagaagttccatcagcgtacacttcctgtagatgagtacacccggcaagattcaatgtacctgacaacgtggaaatattagatagcaatagtcgttgcagagatatacaattagataatgtcaatgaagaaatagatatgactatagcctctgttttgcttcctaaacgaatatcacgaagcatacgtccctgaataatcatggaaccttgcacattcttattataccagtcacctatatcctgcaagtaggaagcaccctgtattgcattttgctgatcaccggaaccggataattcaatctccattacacacacatccccagctttcgttcgtgcaccccgaattatacttgtaccgttagcaatagccggatacatatccatagccggagtcagttcatatttgatcgtattaccagcagcacgcacagtgatagtatcggaaccattagcagagaacaagccaaaattatacttcgacatcatataaaggatgcgtttggtcacccaccgttgttccgcagcataatgatcacccaatgactgtgtaatcgggtctgtatcattcgaataagttccggcattataagccagtttaccattttcatatgctatccttgcatcagcgttaaaagcattagaagggaaatattcctgagcctcattaaaaaaatattttttatagaatgcataaagtttctcaagatcattaccactttttaatccgctcaatgcctgcatagaagtcatcatcaggcgcatattagtagtcttctcttcagcaaaggcaagttccatcaaattaaagaaattattagactcaccattccatacagatgccccagtttcatctacatcatgcgtttccacactatacgatttctccggcaaaccacgattagtcgtatcaaaccgggtatcagcatcatcgatacgccatctccatttagaattctccataccgaaagagtatggatatgtattttttgcccgttcgtctgtaccagcattaaactccacattattcataaatgtcaacgtgtcttgtatatgccaaaagtccggtgcttcccggcgaaacttcgagatacgagcattgataaagagagtattcagttcatcattattttttcctgttaagtccttacttagcaatccatagcctttatccacaagctgagagttaagatttatctgcccttcacctatatcagacggaatgaacctaccttctgccgactcgaaataataaacattatattggttcacatcaccgcctttcgcaatccaaaattcataaggctgatttttatagtctgcaagctgagcgttcaactcatccaacgtaccgttgaaaggcaaaagccgtggtgagcactgatagacgatgttatatgccggaataaacttcgatatattttccaattcaccggcaccgaaatcccatgaattggctccattatactgaaaagcctcctcatcttcattataggcaatatatgatttattcggattccagggaacacggaacaaagtacataatggcgaattatccgccccttcaatagatatcatgtccggaaataagtccgtatcatacccaaaagtatatttatctcctttatccggtccgaaagtatataatcctttgaaagtatataccgattctccgtcatcattcaacgatttttcaaaacagacaaatggcatctgataaacagcgacacgagcattcttatacatttccgtctgcatagcttcatttaacaaccccatttcacgatataaatcttcgtaagagttgaccgaacctattttatgagattgcattgaggacgcataattctttttcgccgtaaacttctgtccagccggaatccaaggtaccatttgccatttcttacttccggttgtcccgtctgcaaaagtaatcacagagttgtttttatccagttggtaacgggtattccacaaataatatttcatggaagatgttccttgtcctttagctgctacattagtaatagaaacattccattccggatgatcataaaaaagaatttccagtgttccgacccgctgcgcctgatcgagcatatacgggatcgtattatcaaataccagacaattgaactgatctcttgtgttatcaaagtctatctccgaaccattgggatccaaaatatcattaaaagctttcactcttgccttttcttccgtatcagacagccaattgatataattcgtcagtactccctgtgaagttaatcctgatgcatactcgcgtataccataaacatccacatcggcataatccgacccaataacaatagctcccgattgagcgaaataatcattatcttcataagtaaactccctgtttttacgtccgttgatatacagtatacacagattaaatcccgggttaccgtaagccgtcggcaaaacagtcagcgtcagccttgtacgttttccttcaaaggtatgcaaactttgcacactgtcatctttcaaagactgtgtatgcatgatgatgtcatccgcataaagattcaatcctataaaagaatttcccgatggagatgatatcgtcatcactggttccgaatagtttgtcacattatccactctataatcaatttcaatggtgattcctcgacgggcacactctgtactgaatggatgacggtctatagtcaacagagaccccgccatcagacgaagaactttttctccattcgtattcgtagtccaacaatcatttccccagtttactccttcccatagtgctttcacctcagagccatcaatctcattcactatcgcctgtcggtttgcctgactattactacgagttttagggttcagataaaacacagctcccggtacagcagaatagccggaagaattatccacagtaaaaataataggtgcagtgaggtcatcatctccatccttcaccaaagctacaatgtcaaatccggagttatccattgtctctatttcaagggaaagagaaaaaatatgctttgccgaacaagtgatgctgtcctcattagacacatatacatccgttgtatccttgcgaacaaaaaattgtgctgacgtagttacattgtccccatcatacatggtatattcaaacaacgtattttcagcccagttcattcctttgttaagaacgttattgattgcaatcaacttagtttggtcaccggtcattgcacagatcacattaaaggaaactgttcttgttttaatacttccatccgaattggcaacataagcagaaatattgaatactcctgtctttccaggatgcggaatagagtagttgtacgaggtttcaatatacactcccatccctacagacacttcatacaattcgttataatctgttccagtgacagttacgaataaagttttcgatacatttccacctatattcagattgaaaagaatatctccactataggcagtccaccatttaaaattatcggcattaatcgaaagagtagtcagttgtactgtatatacaaatgcaggagtcgtcgtttccgtaatctcaccagtgattttaatcattacattattggcaccggaagtcagaaactcggctacatccacattaagagaagtagcagaattcacgtacatcatcttcactaccacatattctgtattgttggagttacgtactgagatctgacaaagtccacgctctcctgtattttcatacgggtctttcgaactatatcgttcctggcttatgaaagtgaatttcaaataacacggttctcctttactggctgatatatttttattatcaagatcattcacaatacgtacattgcgctgcaatccgatctccgtatttcccatttccttcacattccatttacttccatcccatatatagaaaaggtcatcatcgagcacataacacaaagtaggcacttcaagcctctccaatgggatgtcatctctttctgcaatagtgcgtacgcacttgattccaccttttccatatttactataatgggtaggatatctatcttcatcagttcccggaacaacaggagcatatacattcgttccttttaaatcttcactcattatcttctgtttttttagttttcatattccattctttcatattttcaatttatggaccatacgtcctgctataatgaaaataaatatgataataaccagcatggcagcacctccaaaatccagtttaaactgctgccatgtggaaagctgtttttccaccgggaaaggaatcggtatagaatcagtctttatcaaagtatccgtcctattcacatattgatacttatacagatacttacatttatactgatatatcgtatctccctttaccgctatatatacactatcatgctgatatatgctatcatgccttatgctatcacgagtccgatactccgttttcacggtttcaaccggaacatattgagttcggcaggaactaagtcctcctcccaatatcagaaggaagattatcacatctaccaagcatctcatgatgcggtatctttcaaatagtcagtaattccatcaatatgcgtttgcactaccagttgttttccttcagcagacaaaagaaattctacatcttttttgttatcctgaaagaaattctctgttaatacagccggacagatcgtatcacggcatatagcaagattctgtatccaaaacaattgttcttgcactggttgacgcacaaaagctgatttagctttagctgatttagctttagctgatttagctttagctgattcagccaggcacattgccagacgcttactattaacagaagcattatttgatacaaatacactccatccacgtgcagtcagccaatccgtaccataacctgccgcattacaatgaatagaaattaatatagcattaccttcagtttcccggtaaatgttatttgcccgcctacatcgtacggaaagaggaatatctatattctctttcactatgcgctccgcattaaaacctttttcacgtaatccggttactatcctatctgcgatttctcgggtatatatccattctttcaaccttccatccggcgaacatttacccggtgtattttcaccatgtccgttatctatcagtattttcatgtttcaatgttcttttaaattaataatcacttggaggctgtcttctgtcacatctatgaacatcacatcgtttcgcttcagcctcctttaatttcaattcaattccgtgccgtttatgaatttcatctaaatgggcagcttgttcctgacgaagttctacataaattgtatcaatctttgcatccctttgggcaatacgttcctcaagccaggcaatttgtttacgctcattttcgctttccatagcatctgcagaagcatcttccttgcgtgcgtttgtcttccggtttacgtagaaatttacgatccattttatcgcttccaagccaccgagtgcacctattatcgctaaccaatcgtttagttccatgccattctttactacccttttgtttgcatttgatttgcgttaacaggtaccaaatcatactttaagaaatcagccgcattagggtgatagtatagctgataagcattagagtttttaattaaccaagtaccgacataccatgcagcctgaataccagtagggatgaatattaactcaaccggataatattgtggtactgttactgtatcgacattctttactacagaactatcaggccagacgcctctccagttggtggagtagaaatacttaaactggcccttggaagtcccactccgggtatcatgtatgcctatactcaatatctgcgatgacatatttataatcgtaatatctatcgcctgatttagttttaagtccaatttacctccaaatctttttataggtacattaaggtaagtatatccaccgatagcagatgaaagggttgatattacatactgagaagtgacagccagatatggaggtaacgattcgcccgaaaaatgagatgctccggaagctattgagttattaatacttacactatttaattcaattgttccatcagaatcaaatacaatcttaccacctccaagaaatccacttcctttattaaaatcaaacaagatattgggtgtaaaaggcgcattagactctcctatagttgatggatcaaataattgaaattggtcgctaatctctccatccgcatctactcctctttggctgtacatataatcaccgcaaaatacagcactagatagtttcgaaaaatcattaatttttatttcatcagattctattctccccttaaactggtacgtcccattttccgggtccatctcaaacattatcttattgtctgccaaagcaaagattcctgttcgctttttaccatctgcttctgtcaaacaatcctttccctgtgctataccagtcaattttccatctgcagaacgtgttccactgaacattttgggtgttactatgtatccaccaccaatttccgtagcatatccattccattcttcaatccacggtaaaagattggcatcctttcccggctccccctgattacctttcacctttataggatccccccattcgccagattccgcatcctcagccaccttttgagaaatccaaataacagcagccgttgcattggtatgccatccccctgttgttccgtttccatttggtcgtgcaggttcctcctcactgtcatgataggtaatatagacgtcctttccatctttgccgttcgcaccttccgtaccgtcattaccatccgccaccatcaacgtccatgaaatgccattataaagatatacacgtccatcaatcgtgttacggtaaacccagtttttctgcgggtttgcaggagacgttgacaactctcctttccacacaatatcaagaccgtcttttccattctcaccattaacaccatctaatccatctttaccatcttgccccggttcacccttcaaattttcttttgtttcatcatccagattatcccatgccaatttcacaccagtaccaaaacgaaatccctcagcatcccatttgatagcgcctcttccgataaatcctgagccatcaggattaaactgatagagcacagagccaccattatctatccctttaataattccgttaacacaataaaatcctttcaacccattacttccgggaatatcgccacccatacgaactttcaaacaatcagaccaatctttcgaataaattccatccaatacatcaatagcaggttgtgctccttcgtcagcatgcatataaatagcagaatgccgaccgatatatttctcatcatgagaactatttccaaattgcacgatgtcatctcccggtacgggaggattcatcaccactccttccccatctacatcaaattcggatttaaggatacggataacaccctccgctactgattcaatttctacatgatatagcttctgtccaccggaaaactcctgacaacggataaagtcatgttctacaaaactcatgtccgcgtcttctattgtaataaggtaagctattccgtcatcagaaacattaaccgtttttatttttccacatccttgtgtgatagcttgcgcaccgatgattgcacgaatcttacttaccaataactcaaatacagtgaactgtccacgtaccctgagtgcatcgacctcaagcatccattttcctgatacatactcccatatcttccatccatgcccagcgaatccggatacaaaatcttccacatactccttcactccgtttgctaatttctgcccggtttctttggcagaacagaggaatccataaaacttaccgttacttaatattgccattactttacttctatatttaacacatccgtttgaatgctgtttaacctgaatattgtataactctctgtgtacccataaacattagtcaccgtccgaacttcttttacccaatctgaattacgcaatccgccaatccaaaactgaatatcagaaatcatggaagcaggtaaaatataataaggatacttgccaccggaacaatcaaatacagtagtttttaatggtcgctcggcccaagaacttgtcaatgccaaaatctcttcatcagtgagagcctcatggacagaaaccccataatacttcttcaatctgaacttcacggaaatagaatccctataaacttcaccattatagacagcggacaaagtatacgttgtatcagctgtaacatccttatattgttttgcccggctgtcaataggcattgactctccattgacagactgtgatgtaacatcccggtcataactccacgaaagattaattgtttgcgtacttcctttctcataaattccgcctccccctgccagagacaaggtaaacgggaacaccttcgacatcaattgtgaaacattagagaacaatgtcgtgtttactgtccactcggaagctccggcaagtcgtactataatatcatccgtctccgatgttttgtcagcttcttcactgacgttatccattcctccaagagtagtaactccaccccctacagacaactcttctacgattgcatcctcagactcttcaatgagtcacatgaaagaagcctcctcggttacttcttttttacggatcaccagtccgttattagcttctaccagttccgatgataccagtcctttagtgaaagttatccgtcctgccgcttcgtcattataaattctgctgagcgccctccctctaatctcgtttataatccttttcgaagaaaacacattccgatccgatggttgtgttttatcatttataccgattacatagactccggtaccgccaccgccatttccacttgatccattgaatgcctgtcctttgaaagtcagggagtccactttgttttctatttcccccaagcgggagtatgcagccgtttcaccaatcgtatataccggatgatcatgggggatatccaaagcgcattcataaccgataatacgtgactgacgcccatcttcgaaatagttcttgttaataagattcacacggtcgcctaattcgaaccttctgatatccccatcgttataaatatagtcaggcaacatcttacaactataagtagaagggtcttgcatcgatttctctacatacttttcagccatttcaagcagttcttgttcggcacttggcagcatgttatcagaaacaaacttcgtatcgaatccataaagaatatacgtatcaccattggaaggcttcagggattcatcaggtataggacgcccataatcttcatttctcacaatttcaaacacttgtgcaagaggattccatgaaccatcagcattcttttccggctgttggtcttcatttttatccttatcccaggggttaaatgttacggtaaagttcattccgttcattgctcccgactggaatataatattcagttcctgtcccggcaacacataatctttggaaaaagtcattccgttatctttaaaacgataggcattccatttcttgaaaaccggttctttaccttcctcttctatcttatccgtatattcatgaagaacaatatcagacattgtccctatcctgcgtgggtaaacatcttcaaaaacaaccacctcttcaatagcttcttccatactcatcccgggaaaggcatcgatatagggcgtgtcacccggcaacatcaggcgtttctgtactacgccattcatcactacatcttcatcttgcggacgataatcagacggcaggttccgggttgatccgaaagcgtagatacgggtagcataactggtctggctgtccgaacgtgtcatatctccgacatttacacctatctcaaaatctaccggatcactatattcacatcgtccgaagtgtatgatgctatccgttatccaccattcgcattgccatgtttctgcaatctgtgtcaatgcgtcaatcatattcgtgctatcatacgtaatcagtttagcagagttgtctaccgtaccatctgtgacgtagctgaaagcccgtcccctgtagttatagccgagtacttcaagattcttcaggaatactttcatgtgagtgtccaacgtagaggtcaggctccatccggactctttgtttcctttctccggagtatagaagaacttcttattcttccatttccaatagtaggcatccagtcggagatcatagtcgtaacctcccgtttctgcgttataatccggcttatataaatcaacaagctcaaatacccctatctcgttgtcgatataatctcccaaagagaaatacacaggtttcaaggcagagaacttcaaagttatataatcctccttcatcaacaggaacttacgcttgctcccttgatttacgggagtagaaaagcgtatatttccggatatgtctttaatatctatcatactgttttcattctatcattaggattcggttcatatagtttcagtgagaactttccaatgccgcgcataaactggctgaattggctgcacgattgataaatcgttttgtacacgactttaggctgatatttggtttctatctcaagtgcgcctgttgccagttcttcacaaaagctattgtatctctcaaaaaactgttcctcactggaagccgtcaggttaatctgaagagtcagatttctcacatctacccttggattggcgatgaccacccgttttccatgttccagccgactctcgttttctataaaagttttgttggaggatggtgtcattagttcggataatgcattattatccatgcttatgccccaagtagtgtaggcatctttaccgttaatacgcaattcgtctttcataatattacaactgtttcgtccttatctatttccatttcacaattaccgacattcactattagaatcacagcataaccggatgctttaattttagcctttgcaccgtgcatcaagattactttatgaaccactgtattatcatcataagtaagaattccggaagtgcctcccaccaaaccaatattggcatcattagagcggatgacctcgccgctatcgacaaatactccaaactcctcaacatattctttcattccctgaaacatttccaaagagggaaaattgttctcttcacaaaattcccgaccttggggagtgaagaaaagccataccagacttttccagtcacttacgccattcgatttactgcaagctccgaataaggaagctgatttcattatatcatttactgattccattaccttgttattttgtggttaaactttttgtgttataagctatattatcaagcttctctccgaatcccaatagcaccttggtatatttcgcaatatcttccagatgtccattagacatcacagcaagatttctcatttcggtcaacaggatgttgccggtagaagtattcgtacacaatgaagaaagattacctaaaatgaaaaacattgaatttttaatttcttcattagatatctgcaaagcggtgaagcggccattcaactcatctcctgtttcctgagacattgcagtaaacccacctttggtagattcttgtgaagaagactctttttcgtcacctttcatgtattcatccgcccaaccaaactggcgatccaaatcgtccataatagcctgtgcgtctttctctatttgttgccgttcccaatcactgatcattttatctgagaagaatcctgccaactttgcacgtagtttctccattggctccgaagaagcagcttttatcgcctccgtaatcatctgcttaatcatattcttcacgaggtcttttgaagattttgccttatcatctcctgtgctccatgcgtcagcatacgcctgtgcaaaatcatcaatagcagctttcaggtcttcaccgaaaatgacatctattgccttttctttattgccggctataaccttatctatatcctctatctgttgctcccattcatcaattcttccccaatcagttttctttttatctttctcttcggcaatctgattccgaataagtactttctgttgttcaagcaacgtattctgctgctctatcagttcggaggcatctgtagaaaatgctttatccaacgaatcaccaagattttcgtatgatttttcgagaacttctatttgttcctgaattctttgaatattcttttcattcttggcgtcatgaagtttagcaagcgatgatcccaatgatgatacaaggccgatagcagcaccggcagccgctccccaaggaccaaacattgcacctgcctgagcgccggacatagctgcacctgctgcatccatagctacgttcattccttctgctactccactcaatgtgtcgtttccaaaagcatctcctaaactggacaaagcatctgaaaagaatttagtgctctgcatagctgcattcagtgagtctcctatttcactcaatgctgtttttaatttttcaggatcattattagcttcgaaaagatgctcgaaaccaatggacattttattcaatgacgtatcgctcgaatctgcctgcttatttaagtcctcaatacttttttctatcttctcaatttccggagaagagcttttcaaagcatcgaaactctcttgcgaaatgccaaacttagctccttcagcagcatcccaatttccattctttataaaatctaaagcctcttttgccttgtcgacaatagtacgcatgtctttaacagtacgttcttttacgtcagaaaacagttgaccaaatccagatgaactttctgccgcttttatgtctagctcagagagggactttttagtttcttcatcaataacttgcttttcttcctcacctttaccttcttttctttttgaaccaagattttcaatagccttacgcttttccatgaaagttttataatccttcaaatactcatccattgcttgcctttcagattcataataggcacggagttcatttgcttgttttgtagtaagattcttgtatcgcccaataaattccttatctaaatcatctacattcacactagagacatcaaactcttttcttatatattctgaatcatcagcaattctaatatcctcattggcatcaaatattgctttttctttttcaatcctttgccgtttaagctccttaatttcacgatctaaagcttgtctttctttctcctgatttaactccaactgcctaaactttttctcaggtccgtcagctaatgcttcaatttctgcttgttgaattctaatttctgaatcttcagcaaaacgaatcttttccaccgtttgttgttcaataagtttcatgtattttttgtgaacttcctcaatatctttcgtatcattccctttcttaagaggagacttctgcttatttagcccaagtccattcattatctcatctgcttcctcagaacttagcaaagacttttgcccattaagcatcatcttgctatatgattctttaactttcttatcattagcccttgcttttacttcactaggagtcaataaatacccatcatcaccaagcattccttgagcttgtaacaaatcatattcttctctagtagaagcctttttacctatctttataggtactccttgaataacctctgtattattcaaactctctttatcagcttctttcctccaatattcagcagcattctttgcttcaacatatttttttgcttcttcctgcatttcatttgcatataccagagacacagctttagcaatctgtgcgttaacaaatttgtctttattatcaataagtaattgttgagcatcctttacgctattaatcgaaacaccaagttcatcaaatgcctttttattgtctacaataaattttttttgggcatccatatcatcacctagtgccttaaatttagtagataatagctcaatcatagctaccggttttgctgcataattctgaatcgctgcattaaattcctttacactttcattcaatcgttcttgttcttcctgctgtttctttgtctgagatgaccataatgcatagaaacctatcaatgtagaaatagcagctaaaatccagccaaatataggaatagatttaatagctaaacctattgcacggaacgatccagccaaacctagatttacaacagttcccgttgatgcggcaactgtttctattccttgtgcagccgctgcttgaagagtaatagtccgccaccacatttttaacttacctacaatatttaactgaaatgccgattctttactcagcactgtatgcacttgctgcagtccattagtgagtgcaatagccgtttgaaccttttgcattatcttttgcaatgtttcattctcgatagaaaataatcccagcatagaggaagctgcagagaaagcaccggacaaaccttctaatccagaaattactcctccaaaagtagcatccgcatttacattcttcatagcgtcagacaaggaatctgccttttcctttaatgctgcataagcttccgtattttgctgcccagtattacgcatttcttccatttccccatgtaccgatgacatttccgtagataaagcagataattcattttgaactgcttccaatttttgttgataagaaagtaattctgtattcaaatgcactaattctgtatattgattattaatatccactgaaagattttctcgtgaatttacttctttaccaatggataaattttgcccttgattatcattagtaccattttctgaatatttttcaataccattccttaaatttgctaagcgtacttggttttcggaatccaacttagacaaagattttatagcatcatttatctgtttatgcatacttctaatcgcatttcccaccgtacttgtagtcaaagttacattatcagccatctgttgaaatgacaaacttaccttctgtccttgtttttccatctcctttgctgtaatccgaacagcagagcgtatttgctccaatttttctataaaatcagagttattcaccgtaatatcaaaatttaatttactcataacatataattatcatttagtttatacactgcaaagctattccacatttcaatcgttattatattttgccgcacagtattcgtgacctcttagaaatagtcactattttcaatttacctacaccaatttcatcatttttgattccacttttcgctatctttacttatatcttattaccaattacctaattagcagtaattaatcaattcattcaccagtccaatataaaattttacaaaagctttcccaatcaatatattatgtatacatttgcaaaaacagaacattcaatacattacatattatgaaaatattagccataacaacagcccttttatttgcgataaactcctatgcgcaaattacaactataacaacaaaagaaaaagaggaacctgttgaggtacaaaagtatgacagtcttaaaagcctaaatatcgagaatgtactgtttcataaaggacaaactttatttcttaaaggcactagctatgcaaaagaacatgattattactgtactttttttacaagaattcccccaaaaagttgggatactacttacacctacaaacaaactcctggaaagaaggagggacatagcaactattccgaattagttggaaagtactataagattttatctgtcgaagcagataagacaaatccatatgaaacgacctattggctccaattattagatgatgataacactatattttattatcatatgagaatgggactaaatggttttataactttaggctattatgaaaaaatgaagcaaacgtttgttggcaaggacttctattcacaaggaacattagaacgtgaaaaagtagacagtaaagaaacagtaaagtttccacctaaaactaaattcaaatgtatcgatattgccattaagataggagaagatgaacccacctttgcagtgcttgaaaatgagaaatacgggaaaattaaaggtgagatcatcaaaggacagaggttacatatgtttatcagtgtatcggcatgtaatgaatatataaaaaaatacggaacaaaatttggtaactgcgtagcagaaggaaaaattgaaattggcatgaataaaaaaatggttcgagatgcttggggagctcctgatcatataaatacaactactggtagttatggaactcacgaacaatgggtatatgatagcaggtatatatatttcaaaaatggaatagtaacatccatacaatactaaaaggaaatcaaacattcaacacattatatattatgaaaatattagccataacaacaacagcccttttgtttgcaataagtgcctatgcgcaaattacaactataacaacaaaagaaaaagaagtaccagtagaggtacaaaagtatgatagtctcgaaagtttagattatgacaatgccccattacacaaaggacaaacattatttcttaaaggtagtagttacacaaaagaaaatggattttacatggatttcttttctaaaatcattgacggttgggataccgatatgtacacatataaaccaatctcaaggacaaaagatggagaaatagttagtagctattctgaactagcaggaaagtattacaaggtattatctgttgaatctagaaaatccgacatggaaggtattgtctattggtttaatttaataggtgacgataacatacctttttattttaaattagttaaaggttatggaaatccttttgtgactttaggctattatgagaaaatgaaacaatcatttgttggcaaagagttctatttcaaaggaagatatgaactcaacaaagtcgacatagaagaaactataatacctcccttcaaaacgaaattcaaatgtaccgatattgctgtcaatgtaggagaagacggaccaatatttgcagtactagaaaatgagaagttcggtaaggttaaaggagagattattagaggacaaaaattaaatcacttcataaccattacattttataatgaatgcgttaagaaatacggaacaaaatttgggagttgcgtagcagaaggaaaaattgaaattggcatgaataaaaaaaatggttagagatgcttggggagctcctgatcatataaatacaactacaggaagttatggaactcatgaacagtgggtatatgatgaccgatatttatatttcgagaatggaatattgacatctagacaatactaaaaaacagagtatttcctgatttcaacaaatataaagatgccaaaatgtatctattataagatttctatttcacctttatgtaagtttcattttctaacaagtgacataacaagtattattatctcacttctcaagtattaacatttcacatatcaggtattaatacccgacaactcaagtattaatacctgatatataatttcacatagaaaagagcacaagctataatatccatttaatacatgaaaattattagagaatcttttggcattcaatatattctgcctacctttgcagcattaattaacattaatgctttgcctgcaaagcggcaaaacaaacatagggaaatattaacgggaaatatacattgtgggacaaatagatagtgggaaatgctatttgcctatataaagcttaatataaacatgactaaagtaaaaagaaattctgcttaatttctaagcaatgagatgattatacacctacctcaataatcgtgcattatctccacacttattagatcaattaaacatattcaaaagaaatacaatcaaagatttaaaaccaaatctttggtaatggacctgcaaaacaaacttttaataaacatataaaaatgaagaaaatcttactactattggttctattgccaatattcatgacatcatgttctaatgatgacgaatccaccgaacaaactttctttgtaaacgtgtacactaaatgggaggactcagaagaaaaagttgctaaaaaagcctttctgtacatttacgaaaatgagaacaaaagtatcgacaacagccaaagcactatctcggttgttaatgacggactaatcacatatacggatggaagcaaatcttccaaacctaaatatgctactaaatttcaatccggagtattcaatattgaaaatatgcccaatggagaatacatattatgggttacctatatggaagaatatggaggacgtacctattcatcttacaaagcaatcagcgtaaaccacgattatagaggaaaaagtgaaaagaaggtctttcaaacttctatgcaagatcaaggattgtatgtatatcaaaactggtaatcagaattaatattaactcttttcttagaatctaagaaaaacaaacaactattgtatgaaaagaattattttgagtgctctaattggattaatggcaattagtgcaagcgcacaacttatgcgcagtgaagaactagagaaatacgctaaagaaaaatttggcgacaaatgggtagatgcggcagcaaacataggttcacaacttgcactggacaaaaacaactctctgacatatactcaggttattgagtgtggagaacaaaccaaagaaaaattgtatgttactcttaaccattggtttgtagaatcttttaatgacgcaaactctgtcattcaacttaatgacaaagaagaaggagttattatcggcaaaggttacctttctgatattgcaggacacttaggcggaatgaacgcatataatgtcagcgttcaccctattattaaagtggacatcaaagataaaaaaattcgtgtgacctataccgtacaatgttttgaggtggagaaagctgtaggaggcggtgtcatgtctgctctgtcaaacaccagaccttccatatccacagaaaaatggccgcttgaaacctgttaccctttcattgagaaggatgaacataaagcgaaaaagacttcttcaaaagcattagtaatgactcatgcatactctaatgtaattatggataagattgaggaggctgtgaaaaatggtcttgccggcaatgaatctgataattggtaattaataaattagcgcatctcgaacgaacgaggtgcgctaaatatcccaccgaaataagcttatagatttatatattaaattcccaatatagacttaagttcctgcagatctgcagcttgaatactccttgatttaggagactgaggaacatacaccaccataatgaaaccactttcaacggataatctaacccccatattatatttatccgaatcattattgatgaagtaatatgcaccatcactatccttccctattacctgatatctctctgacagaaatttagctatttcttcagtatacgaataggaaagagctatagctgaagaagttaattttccattctcaaacagataagcaacgctctttacagcactattctcgcctctgtatcccaatgtacttgttttatcctccagaatagtacgtttctctttagccttaacagttgccttatccacaccaaattccaatacaggttctgtgtaagtgctatatttagcatttaccacaacttcacacagcgcctctccattatctgaagttgcagtgataattgtttttccaacatgatttcctttgattattccatcctcacttacttcagctacaaattcactctttgaactccaagtagcattgtcgtttaccgttacttgttttgtgtcgcccgaatacaaagaaacttgattagcactcagagttagtttcccatcttcactcttactacatccggcaatcactaaaacagccgtcattaaaaataaaatctttttcattacttgttaatatttagctagcttatttcgtttgtgcattcattttaccaattcatatcccacctatgaatcctttatgtaaaacgtgataaatatttggcaaagatacaaataacaacaacataacatcactaatccgtaataattatttctataaattactcactaatcattctccttatcaaatctctattctccggatcatccgcattgatcacctcaccatctccacgacctaactttttacgttctttataaactgtcaaaatataatcttttccatcccgattaataagcgtagaatcgctaaaatcacacattcgggaatcagacttcacataattcaatgttgtatgatacatccctgacacgtccctacacaggagaaaagagcctttcggtaattactgtttccgaatgaattttccaaaaagtagcgatttcattgagatttcacccattcattaaccgcatatcactaattcacactaattatttctatcaaagtctcacctttttatttggttattaaaaaaaaaaactacttttgtaaatgcttaaagcacatacaatattatattgatgaacgattaatagacaatttgtgttattaaataaaataccagcctaatattctatatcgtatgaggtttgtgtatttttacgcatttgctaaaatttaatatataaaaaagatgggacttctcagtttcttaaaaaattgcactgttagaaaaatattcagtgtggcagcgggtgatccaggacaagttgatttattatcaagtaataatatgtatagagtcatatttactgataaatgtaaagatgaactcgaaaagcaatcagaggagtatattcttttcaaagtagaaggtaattcaatggctatagagaacatccataagggtgattttttattggcaaaagaattaagccttcaagaaaaaactcaaataaagaaaaatgatattttaatcttcaaagttgataaagtactgtttcaaaaacattatccggaaaaagttaatcctattgattacaaattaaggaaattctgtgattacataaatctgagcttaacagatgacactattttagctaatgtacgtagtgtcatatatgaaattaatcaacctaaatataaggataagtttttaaaaaagttagcgcgtgcgcgtaatgactttaaagatgaatcattgatactattatcagttacatacttaaataatagtattgacttttcgttgcatcctctcaaagacttatttgctaaaactgaatatttgtgtaatataaagaattcagacaatacttttgtctgtgaccaagcaacatctattagttctaatacaaaccaacgtttatttagtgcaataaaataccttgcagaaaataaaatagatcgctacataagtggagttactacagaatttagagataatgtacttaaagccattttaacctcaacacaatctaagatcagaggagcatttgctgaattttcagacatatttaataatgaacaaattggactaataagaaatatcttaagcaaaggagtaaatcttgagatcgtgatatataatgaattaaatgaagataatatcctttttttacagaataacttacttgattatacacagcaaatagtaataaaggcatcggggttagataaaaaatttctaaaagatggtgaagccatcagtttttgtatcggtgacgattcaatgtatatattgagacctgatattgaacaatctttagttgaatccaattttaaagataacgaactttgcgaaaaactaacaacactatttgatacaaattttgcaagcctggaaacgattagtcttgttgattaaaatagtatatagactttattggatatacgatggaaaactcatataattatgccgctcttatacagatggctgtaacattttgctttctttttgtagctttgcaaaaaaatgatgtgatgaaacgtgtagtagattttgtcaatatgatgcttcaaaacattagaaaagaaaaagaacagtattatagcgttatgtctgatcttatgccgggatactcattaaacaaatgtcctgattatctagttaaagattataataatatcaacaaatcgctaatcttcttcaataagctgattcattggaaccctacgtatatgtcgccttggtgtttattctgtggattatatggactaatcttattatttctatttgctgaattaagtgaggtttcaagtataatgaatttttttcttatattcatagaattatccacaataatcaatctcatataaatccggaaaaaccagacgtgccgcttaacaaaaacgatgcgtttcaaaaagtacaaaaacgacgcgtacaagaaaaaaggtgagcgcggtcctattcagcatgatcaaagcccaccgtttttctttcacttgaaccctctttaaatggctttaaaatatcatttaaaagccattgcagattcaaaataattccctatctttatgcaatgttaggctgctatacctgacacttcatccggcttcgtgtacagcatcatgtctgtatatttagcttgatagtttacgcttgcactaaactccgctttcctgcattccttgaatgggctgccgacaaatgggtttcggtccatccagtcgcacagttctaaaatggaggacttgttcgaagtgaagtacacaaacgaatgccctttcagaacggtcagcacgtccaggtagtcagccagacgccaggacatctcgtaagtacccacctcggtggaaaggtacggcggatcaaccaggaacaccacacccggaacatccttgtaacgtttgaatacttccttgtagtcttcgctggttatagtcagtccttccagataatcctttgcttcgggataatctgtttgccgaatcctattgtagatggcttctttcttcattccttccaaactggtcacatatttcatggcgaacaacaaggatgcggaaaccgtgatataatccacgtagccgtgctctttttcttccctctcaatacgggcaaacattttatcgcgaacctccccggttatacgtttatttctgggttccccttcagctatccggcgcaaatcggataacagcacattggtggctgggatattcgcaagcctccggcggtagttgtcgaagtcgttatacacaacggcggcatcaagcctgacacatttggtaatatgtgacagcaggcccgagccgccaaataggtccacaaacacggtgctgcccgggaactgtcccagcaccctgataaaatccttcgcaaacatgcgtttctgccccacgaaaggaagcggggcggacaaatacatctttttcatttcattctgctttaaaacggccgcaaaggtccccagaataaacgaaaaacagcgggaaacatgaacggttcccgctgcaagacatatacagcaaactacacgttcagcccgaagcggaccgcctcgtcaccggcaagcagtgcgcgggttccctggatattgttctcgtagatatgcacatttcccaagtagagggtgatcgacttcaagggaagttctatctgccgcgccatcaggtacaagtggtaaatatcggaaggtagcccgaggttcgcgtcactgctacgctggtaggcggatagaaccagttcaccgccatctaactggaactgtaccagactcaaacagggtgcctggttgctctcggcaccggtttcgcccaggaaaagcacgtagttcttgctgttgcgcctctcccggttgattttcgctatcaacggaggcagcttctcgaaataggtcgggtaactgttcaccaggatggagccgcaatagtcccaccagttgatgccggcctcccggtacttctccacgttgcgctcaccctgcataaataactgcaactcgctgcggagcttcttgcgggcgatatgatgcccttcgaatatatcgagcaggtctgccggtgtcagcgagagctgctcgttcagaaggtactgtatgtttcccttcttgttggtctgtgtctttcccgtggcaaggatcttgtccaggatgcggtaatacttattcatagccatttcctccttctaaatttgaaactccctaaagataaggggaaacggcactccttgtggcataagactgcctgttcacactgcaagcgtcttgcagtcgctctggaaccgtttcaccagcgcgtacaccttgcgctcgctcaccgaatacttttcggacaatacggccacgacatacgaaactttctcaccctgatccagtaggcgggtatagtctgaatacaaatcaatataccgggcatcctccagacggattccggatgcttgaagccttttcaacagttcccggttaaagtttaatatctcaatcactttcatacaacaaaaaaattatatctttgcatcgccaatcattttttaaacacataaaaagagagaactcgtgacagagggtatttgcccccggtcgcgcgagttctctcgtcgtgtgttaaaaaagtgattggcgttactatttaacaggccgggggcttttttcttccctcccccgaagggttcattccacccggtaatcttccggatcaaaagcgtctttctttctccagccgtcagccagtgtatcctggatgtgcttcatggccttcgtgtagaagtccgtcagttcctccagattctcaaacgtccggtactggggctcctcatccgtcccgaacttgaacgtcaccgggagcatagcgccgccggtctgtacggccaaatcatacgctgccttataattgaactggttctcacttgacagccataccggcatgtcctcatagacaaacccggaaagtatctcccggtcggtctggtcgttgtaccagcccgtgatgacggactttatagtgtccggaccgggtttcccgatgaaaccctcctccatgtaggaggcggagccgtcctccctttcctgcacatcccagcggatgcgccatctgttacgtgccgggctcacgcactcgatcagtcttatcccggatgttccttctacccgtttcatgtaaatatgtatttagttcgacccttgccgaaagtttccgtcttgatggtggtctcgaacggaaagccgtcgggcatatccttcacttgcaagaggatgttcttcatctcctcgctgttggtgaagaactttttcggttcgccgttcatctcaatagccacgatacagcggtcctcgccctgttcggtcttgatgcccgtctcaaagtccttcaccacaatcggtaagtttaccagctcccggatgcttaccaccaccccgggaaaacgtttcttgccgtcctccggcttgtaggaaacgttcaagtctttaaatgatctcatgtctttgcctgttaattttttaaacaacgtatgacagtcggcgtgtttggccattccatagaatgacgctaccagttcacgccttcttcttctcgattttacctcgtgcatttttcgggcgaatttctgcttgatgcgtttacggatacggacatgctccggaccataaatcacataaccgagaaaatcgatgccctcttccaccgggaacacgcgctcgtcagattttatctgaagccctatccgttccatttgtgagtggacagcatcacgaatcatccacagttccgctttcgttttaccaagtacaagaccgtcatcacaataacgatagaaatgacggacactgtacttatccttcaaataatggtctaaaaaaatagacaggagtaaattaccggtagcctgcgagcttctaagcccgaaactgataccgctgtcaagcatcattataaaggaattgagaattccaagcagtttcttgtccttgaaaacacgggcaaagcaccacatagcaaaatcctgacgtacattgtcataaaaatggtgaatgtcaaacttataaccataccctgtcccttccggatccgtttccatgtcacgacagatgaacttcatcaggtcatgggtgccgcgtccctggatagatgccgacgttgtacgtataaagcgcctgcgcaggtgtttgtccactacggtcatgatggcatgtactccgatacggtcatacatcgtaagaatctgcaaattccttgcctttccatattcccagatagtccgttcacgataaccgctgacacggaaagagccgtctgatatacgttctgcaagttcctttataacttcctccctatgcgcaagcaggtagcgtccctggcggcttcgtttacgtgacgttccgcgaaggacctgattgaacgactccgacatgttggagtaatccgctatctcctcgataatataaccttctctgcgcataactgtttttcttggggccttcaatcccccgggcccggcttcttcgaaccgtttccggcctaccaaaccctacccgacactctgtttttcagttttccggcccttacggaccgctgttactgcggcttgcccccctcggcaccacggtggggacaagtccccggtgttgtacgccgattaaaatttcctttcgattgttgttcagacgagaaccgatgttcgtgttcgtattcgaggaatcgttgttcgcattcgacatcgaaacaccgccattcgggttcgcgttgttgttgccacgatagaccacacggcctatggggaggcgccacctttcaaatgcaaaagtactattttcaaattattatttaacaaacagatacaaaacctgacgtcaaaaaaatatttttcgacgggctgacgcccgtaatgaacggcgttcccctgctcggggaacaccggatgttttgtcgcttcgctcccgctttgacgctttacgcggccgatcatgcaacctcgcttatcgctttaaacgccacggcgctcgacgccttaacgagccggccgcggaaggccagacgagaaccgatgctcgcgtacgtattcgaggaatcgtagctcgcatacgacatcgaaacaccgccattcgggttcgcgttgtcgtggccacgatagaccacacggctggaggcagtggatatgtagtagatgtcgcagtaatttgtcgaggaggaacccgaaacggaacccaccggaatcacgtccatatatttgccatgcgccacggcggtaatccagataccggagctcacggaacccttaaccaggcgggtactgccgtcaggcatccagatgcgccacttcccggaattgcccgtgtcattaggaagatccacgccgtccatcatgtcatatttatgaccatagatgtcctcgtagccaaggcagcaaatattattcacctgcgtaaccgtggccccgccgtagtcatccttctcacggtaccacgcatactggtggacggagttttctatcaggctgttcgtcacattagggttgattgaggaggcttcctcgtagccgatcgtgtccgtcataccgcggctggcagtaccacccgtagtacggttgttcgtgtgagagcccgcgccgcattgttcctggctgtcacgacgaccgtacttcgcgtagaaaagattcgcgatgcgcgagtgcataagggcatcaatctgctgcataccgcgctggacactgtaatagtggaaatcagcccaggtcatgctcgccgtagtgctcccgccggtaatgcaggcgcgaagtttggaaccgacaacactgctgcccacaacggcacacaagtgctcgtcattaggcacccattcgggttccatatcctcgatcctgtcactgttagaaaggacaaccttatcgaactctgccgtgttcagaatggagaagtgaagagcagtggcaccctccggaacatcggcaatcaggtacataccggcctcgaacttgttgctcaaggtagggacgacgattgaactgatgaccgtgccggaatcgtctgtgaaaatgcttccgacaaggcttgtaccgggaacgctcgggaaacgcacacgcttgtaaccgtccacgttcaccttgcataccgaatacgtactgtcagtactgtagctgttcgaaagcgtatcctttccgctcatgatcttacgaccggaaagataaccgccactcgtgcccttaatgtcgtcaagcgtaaggacgtcagcatccggaacggaaggcatgttatccgaaccgttactgctgtaacaggagtaatgcttgccgttcaggtaatcattgatacccttgctccagaagaagggctcgtacatcatccagtcaccttcagtgccgtccagtctggcagccgtgccgtcggcgtacttgttgctgtccgtgtcgtccagcgggtagtaggtcatctcaccgtccaggttgttcaccgtggtatcaacgttcgccatgttcacaccccgcgtcgtcgcttttttagtcactttagcaagtacacggtgacgctgcttcaggatggcggaaatatgaccgctcacctcatacgcgttgtcatacttgtagccggtaccgttgtcaaggttgctcacgttcgcgtcatccgatacctcgtcgtcgaactcgatcatcgtgtattccggctgccggatattcagttccgggaagtgcgccttcagagcgctgtacgtatcgtcatcaatgtagcgcgtgagctgtaccgtacccaccaaggcgcacgtgtccgtagtgttgccatcggaatccacaccgcccatcccgacaaacttatccagccacgtaccgtcatcctcgcggtcaataccggttactctgatacgttccacacccgtgcaacggcccagcagggtttcccagtcaatacctggacaactgtcaaagatgaaggtcttcaccttgctgtagctttccaatgtcagcccgccggtggtcagtctgcccagatattccagacggaggctggtcagtgtaccgggaaggtggagcagcgtcacgggagaacccttggctagcaccacgctctgcacctgcgtaccgcgggcctcaagttcttccagcttggtctgcgcactcaaatccagctcggtactggtacttcccccggttttcgcctgtgcctggttacgaaggttgagtttacgtagctgcttgcagttgccgatgttcaaccaccagccggtactgccgttgccggaactttgaaggttcagttcgcgcagcacggtacatttgcccaggtcgaaagcgtttttcaggtggtcggcggccccgctcatatccagcaccttcatacggctcgcgccataaaccctcaagggatcgttcaccgtataggcaccggtgatggaaaggctcgcagccgcatctttcttgatgatgccggtattccctatattcgggctgttgttcgtaccgtagccgaaagcataaacctcgttggccgtaatcttcagcacgtcgggggtgtcagcagccgtacgtgccagatagaggtcgatgttgtcactggtgaaattgctcgtgccgtacttagcatccagaagggcgaaacgattacgcacgaaatattcacggtgcgcacggttactgccctgaagggcgtagatgaacggccacaccttgccgtacatctcctgcgtggcgggcaggatgtacttcagctcgccgctcttgttataggcacggtcgcaccagttgcccgcctgctccacgttcagcatgtccaggacacggctggtggtaagtacaccgcgaagagcctgcgcctgtgtcttcaggtcagcgtccaggttggccagaacgaggttccaaagccagctgtcacggccttcaaaggcatatttcccggcctcggcgtcataagtgtcgcggtcggtggtgtagtcatacaccaggaaacagtcgttacgttttcccatctgggtatcaccgtcgtagtaggtgatgtaccatatcaggccgtcccacgtgcgcagcatcatgttcttcgcacgctggtcaacggcaaggaaatagtccgtccagaggtaatacgtcagcaggaaagccttgtcgaaatagtcacttatctcgtccctgaacttctcgctcttaaaagtggagaggtcggcgctcgtcgcaccgtccggaacacacgagcgtatccatgcgtacagccgtttcacggccgtacgctgcgactcgtcaaggcccgcccatttcacatcatccggaacgttggtctcggcaccggcatcaaacacctcctccagatgagcgtcacttgtggtcttgaaaaggcacatggcctcggtattgttcagcatttccagagtgaggggacaggcaggatcgtaaccctccacgccactaaggccgaacaggtcgccgctcttgcttttctcgttgttgaagttgtattgccccacatagttgttctcgccgtcctccgcagccgccacaaacatgtcgataggcacaccgtcgatagcggtacgcacggtgaccgcgttcaaatcgctgccgcccgtctcgtactggtaacgctgcggaggggtgagaagccccatctccttcagcacgtcgttgaacagtttggcaccgcctgtgttcagcgacatggacgagtcggaataatcactcttcagacagatcaggttcatggcgatgccaccgggacggacgggatatttcttttccgcctgctccttgccgccaacggtgaagctaaggttcgtgccgcccttgctgatatagatacggatgttcttgctcggatatttcgtggaactggtaccctgaatacggatataacagtcacgaagcacgaagtcgtattcggatccgaaaggggagtaatagaagatatccgccgaaaagtccgtcttcttgttgttctcggcatacacgtcatcgagcttgttctggcgcacgatacgcagcacccccttgcccttggcacgcagcttgtccatatccacagtgtcggtatcacccaggatatcgttctcctcatacagcgcgatcatctcctcaccgtccgcactgtccaccatccggttctccagttcctcgtcgtcactcaaccggcgggtatagatacgcacgctctttacctccacgtccgccccggcgctgtcaatggtgatatatttcggattgtcctggcggaagctgaaggcgttgtcgtagatgtcggcaccggtacggttgccgtccacataaagctccatcagacggctctcattgcgggtacccaccatgagggccaccttgatccaccggtcttccacataattcgtgcccagcttgatctcacgctccaccagctcgtcgtcctcgttggtataggacactttctcaccggtcttgaaactcgcttccgaaggggtgatataaagccccttgccactgtcgagacagtccacaactgcggtatcgctgtcagtgggattgcttacccggagggtcagttcaatggtcagccccgtacttttcacatcggtggcaaagggccggtagccgatgacggctttcgcaccgttggtcagcttcagcgcctcacccgtccagccgttgctgctccagtcaaaaccctcgaacgtggtctccacgccgttcgactcccatgttccggggttactctccccgttgctgcggcccgccgcgtcaagcttgaccgccaggccgtaggtggcctcgctgatatcgataccgctctcacccacgtcgatgcgcaaagtgtacccggtcggaccggctttcaggacaagcgtctgcgtgccttcctcggtaaaccggttactgtaggtcatcatgctgcggggagcgctcacggtactgctcttgacgccgtttttccagaactccacttcagcgggcacacggtcgggatcataggccacccagtcgaaagtgagcttctcgtagcggccggcttcaaggaccggctccagatgctcgtcccgtccgaggacatgcccgtcggcatgaatgagcttcaaaccgatgaagggcgcgccggttccggccttcagcaggtcgatatggatgctctcgcttttcagcgtgaggtcgtcagtttccatctcggccaccagctgggcggtatgccgccccacggacaggccggtcatggaaacctcgaaactgccgttcgtcgtgccgctgcgggtgaccgtatgcgcgttctgctgtacaccgtccacgtacaggctgacggttttcgtgccggtaccgctcacggcgtagggtatactcgcggaatcataggtaccgtaaccgccgttctggatggtggccgccaggttgtaaccgcaggaaagggacagggtgacgctcttcacgctcacgtacgcctgcttcttctgcgccttgcccgtggtgggatcggtagtctcggcaatgacgtagatatcgctcgtgcccaccagcaggtatttggtcaggtcaagggtataggtacccttgctcacttccttcagcgaggaggaataagtggtggtcgtcccgcgcttcacctggatggtgacggtcgctttctgtccggtactgctacccttgtcatcaccgccggcaacctggtggtcataggtataggtaagtttcaccgctccgccttccttcacggttttcttgtcggtctcggcaagcagcacgatcttggtggtggaggactcaccgccgccaccgctgccggccgggatgtcaacgctcgcgatctccgccccgctcttgttggtcagcgcaaggcggacactgctctcgtcgtcgctcacttccgcgctcatgccgaacacggtaccggcttccacctcctggaatttggcggcgacggtcttgttctggacgggattggtactgtcggcatccaggctctcgtccacttccagcttgtcgatggtcagatccacgttgccctcgctgtcgggaactttcttctcgccgttcaccgtcaggctcttcatcgttccggcaccgccgaagtcctcccagctcgcctcctgctcccagctcgacagacttgtccccacgaactgtttggtctcccatttgccctgcgagacttcataggtgatgcaacggcccttgtaacggtatttctcatccacggcaccgatcgcggaggaaaggacataataaccgctctccaaagggacttccgccgtcacattatacgtgttaccgccaccgcccgtaccaccgggaatatcaacggaggcaatctccgtcccggtcttccccagcagggtgagtttcaccgtgtcgttctcctcatcagggacggccgtcatgccaccgaccaaaccatcgttcacaccggcggcggcatcctccgcctgtttcgcagccgcggatgccgctgccgcggcggaatttgcagtttcagcagcctgattggcggtaccggccgcatcagacgccatacccgcagctttattcgccaaagccgcagcattatccgctttcgtggcagacgcattcgccgtggcagcggcatcatcggccggtttacgcaaaagggtaagcggagcactcaccagctcactgccgcgaagggcggggagacttttgatattgtcaagggagctgacctccacaagttcatcaacgctctggctctcggccttgatagcgttcaggatctcctgtttttccgcatttgtcatggctaatcctccattacccttctatctgtttcactatttgggaataacagcccggagtaagaccggtgacagcttcctttatcaaaaccgcatcctccgatgtcagatccacatccgcatcggaacccataatcctcatgcaaagactgtaagcatgtaatttcctttcattatccgtctgaatattaccgctcggacggaaaccggtaccgttgaacaggcactgggagactatgactcccatacactggggtttcttatcaatcaacagcacgctaccgtcgaaatccttaaaatacacattaaaatttactttcatatcctttatttttagatatatgtcatcttaacgacaattccattaacaacctcaagggtatagttataagttataaaatcactctttacagcccactggaaggtacctgaaacaccctttcggtaactgtatgtcccatcgctggccaagctccatcccgtaccgtaattgttcgacaggatatcaccacaatacaccgccccgttcacatgcacaccaccgtcaaaatagccggcataagtattggcactgataggatagctttgaccagaggacttgctggaggcatagatagcggcaccacccagattcgagcctacggccttgacaccgaagcgtccctgcgtggcggcattaaaggacacatccacaataccctccatgtccgtttgtgagacaccaagtttcagactgcgggaatcattgccgaaataatcaccggctttccagtacaaccgtccggaatcaatcgtaaaaccgccgattttaccctcataggcatacactgtaccataaatcttggcgttgcgcgtctcaatactaccgtcttccagaatcttgaaattatcattagccgtaacaagtccctccaacgtgatattatcgcccttgatttttacgccgtcacccccaacacctacaagggatttcaaatttccatcaccgtcaatggcatacaacccggaatatttggaagtaaccatcaggccggtctcttccagcaggttctcgtctttgtcgaacaccgccgccgaaatctttaccagacgctccgactgctcgaaaagggttttataacggtgtgtcagggattccacacggtcggtgctcaatatgagcatatacaggtaaatatcaccggtaaaactcaatttaaaatcacctgtaccgttccagagtccgctacaggtgtactgtacgtacccgtcggtcgcggacagttcttcctccacctccatgctgttgaaattggcaaagcctgtcttatccacacccacaaactccacacgcagcgtgccggccttggcacagcggtaaaagaaagtcaggaacaccgggacggcttccttctccccactgtcattttcaggcatggagggaatacttttcaggttctcacgtttctggaggatgtacttgttacgaatccggacaaccgtacggccgtcatcctcggtcacgctcgcgctgtcacccttcctcgtcaagacgttaccgttcgcccagatccaccggttgcccacaaggaagaacacggtctcgttctccgtgttccacttcataaggccgttatcaaaggcggggttattcaggtagccgcgctcggtggcgaagtcattccgcagggcggtgacggaactgacgattttcccctcgactatctcgaacttcgtcttgatatcctcgcccgttaccagaaggaacgtaccacgcaggtaggcgttgtcgctgtacaggccatcaccgtgaggctggttgtctgaagggaaccagtcatcactgataccgtcaaggttgcccaaacgggcacgcaggcagccggtgaagttcttcgccttcaccacgtccatcacgtccacacggggctgcccgtcctcggtggcggagatcaggatcaggttctggcgcaacggattctccgtgttgcccatcagcacgcactcgtcaccagactccggaagagaagcgccgaactcgtcctcgcccacgaggatggaaccaccctccacgccggccacctcaacccaatagcttttcaaattcccgccgctgaaggtctggcagcgcatgaggtcatgggccacgaaagtgttctcctgctcgaaagtgatcctccagtaaccgccctcaagaacagcggtctttattttcccgttggcggcactgacacaaagctggccgccgacgctgcgtaccttctcgataagcagctccaatactaccatgacctggcgtaccgtcagcttgtcgatggtcagatgggacaaagcgtcctccatccagagccgccagccctcaccgaaaagaccgtccacgaatttcggactgcgaagaagctcacgcacaacaagggtcagcagcccggcattgcccttgtcatcaatacccgcattatcctcctgtccgaaagaggctcccgcttcgaaggtgatcttcccctttgcacggtcattcttttttttgctgatgtgttccgcctggcttctccgcgcggaaaaaagattgttgtccgtaggcagtgtcttgtcccagctacggataatgtcaggaagcgcggcaccctccgcctttgacttcgtatagtttttcagttccccgatactgtcattcacccgttcaaacgcaccactatgcagggcatcgctgatctcgatgtccatctccccgggttggttcactttccgggtaattttcgtgatacggctgctgcgataaccggtttcggggaaatactcctcgctttcaagtctcacacgacggcctacggacagggaaacaccgttctcctcaatccacacatggtcggtcggggccttgtaaacggcaagatcctgccagtgttcggtattgaactgttccaccgccgtaagaaactcctcctcggcaagcgggtaatattcgtccggcatacggatattccagagaatataacggtcaccggatttcggaataagtttgccgccggggagttgcgtgtcatcatcatagggccatatcgtaataatctcgaactcacgggtggcactgttgaaattcacctcgaaatagtggtcctcaccctgccccagtccggaaaggtcaccgtcctggaacgatacacgtttggtctcgtcgggcagctcgtaatcgttcggatcgaagttcaggctgtcgtccctgaaataatagaccgtgaaagggttgccgtcgtcatctttcacatcttcgctgcgcacactgctgacagccccgatcctgcggggataaatgccgctgaaggcgtcttgctcgtaacggtcatagatgccgtactcctccgtatgtatctcgacatattgcctgccccccggaagcatcaggcggctatgcccgtattttgacggatctatgttccgcgtgctgcctaccgggaacaaccgggtataaaaattgtcggtacccgtcgtgtcgcgttcgattccggtcagtcccttcccgtagcccagcgttatttcctcgccatgctcacaccggcacacgttcacggtctggccttccacccaccattcagcctgcccgccgaccgcttcggctatctctttcagggcttcgttgcagtacttcccctcgtaatcgatgacgataaggtccgtaccgtccacccgccccactttccagtcggtggtgtggttcattccgtcattgatacacttcacgatcatggccacgtgttcacgcggagtcgctgtcagcgtgaacacaggctcggtgttcccgtcggtggtctccagcacaagaaaacgtctcaccaggctctcgataccgtaaaacttcaaatcatatacccactcctggccgctcttctgcttcggggtgtaccgttcggtcagccagtagcgctcaccctcaaagtccacccggtcattcacgtccagggcgatatattcgtaatgcgtgaaagagagtgtcaggacattgtcaccctgcacctccttcacctgggtggagctgtcgcccgcctcgatatcggtccgtctgttgccgttgctgtcatagatggtcagcatgtctgtatcttgtttaaacgtcgtttgaatagggtttgaatcacatttatatgatcgggacaggttcccggaacttcaccttgaacttgccggcgtgcacgccttccttccagagataggtcagaggctggaacttgctgcaatccgtatatttcacacggagagtcagggcaagttggggaaaggaaatctcaagccacccgtcacggcctttcttcaggaaattgatgaactcgaaatacttcttcagccagccggcctgcgttttgccaaacagggcgaaatgaagcgtcacgtcacgggcctcgttcctgggcgtcagcacggaggaatatttctccccgtcctcctcccggatattcacagccgtgtccgttttcgtcttgctcggggtcaggatggcggtcaggttatccatcccgccgcgcttgtcctcaacgaggaacaccccgtatgtactccagatgtcggtaccgttgacaagtaccagaccgcctaatatcttttccatatcatttgcattttactccgtcacgattgattttacgaatctcttcctctattttgccaaggtgcgacgcgctcgtgccggtgttctcctcgatacgggcaagatgcccctcggcggtgttcatcttgtcgatgacgctctccatcttctcatcgatgctcgaccagtgttgcaacccgctggtgaacatgccgtccagttttgtaccctggtcctgtgtcatggctgaaaaaccgccggttttggcgctctggctcgtaccgcccgagttatcgtacccggtggccgcggcaagattgtcacgaagagcgacggcttcctcgacatacttcatgtactcgtcctggagggccttacgctcggcttctgtaaggtcattgtcttccatcgccttgccgaatttctcccaccagcctttcagcttgtcggaatacagctcaccgatcttgtttgacagcatcgcacgcatgaaatactcggatatgtcctccgccgcggctgcggcatcatacttcatatccatcaggttatccacgaaactgctgtacatgctgtcgaaggaaataccggtgagaccttcatacagctggtcggtaagttcctccagcttgcccgcctggtcgatatagtcatccagcttctcggtcagacgacctccatatccgcccttgccggtatcctggatctgcgtccacatgtccacgttactgcgcaacttcttcatctcctccggacttaggttccagatgtcaccgttccagctacgcccgatctgaccgctcaaacggtcaatctgttcctgtgagaaaccgccccagtaataattccagctgtgatgcgaaccgtgataaccggcctgcgacatggccatgtccagatagttcgagttcgtctcctgctggagcctgtaggcatcccggtaggcggccacggactttgtacccttgctcgccttgatctcctccgtcaggtcctcgatagccgtctgcaaggtctcgttgcgctcggtcagccggtcgatggtttcctggacctctttggcattgcttgaagtcgtccaggaggaaaatccgccccaggtcaatgcgtcgaatatcttgcccacaccggaaagcagcgattttccgatagtcacaaaaagatcaccggaaagcacatcgtcaagaataccgctcacggcattgaacaccgcgtcgagcaggccaccgatgaccacactcaaaccatccttgaaaaggtctataatacttacaatccagccgacaacaggcacatcctcaagtgtttcggaaacctttccgaaagcctcgcccagtttgccgtccacttccttggcacctttgccgagtgtgatcaggccattatacgccccgctgatactgccggaggcaatctgctgcaatccgtccctcacattctccatactggtcttcagaccggaggcagtattcgagagggactgccgggcactgtcagccgtttcctgcaaggcgtttatattctcactcgcggcatcggcattagcctgcgccgtttccagggcttgccgggcggactccttctcctgttcggttccggactgttgcgcctcaatgtatgatttctgggcggcaataagtgccgtataggtgtccgcatacaccgcctgtgcctccttcaggtctgaaagggctttctggtaggcagtaacctcggcacccagtttcttgaaactgaccttgccggaaccgcccaaagccctctccatctgctggacggcagagacaagcgcgtcctggctggcatggtcggcatttcggaactcgtcagtgagcatgtattttctggcatccgccaatacaggctttatcatatcggaaaacatcccgccgaattcaccgaagacagtaccccagtcaatacgggctttcagttcctgcacttcgatgccggcaagtttgctgtcacgttcaacaccgagagagagcttctcgctgccggacgtcgtcttttgtatcttttccgcatattcggtcgcgatggcgagtttctgctgctggaaggtgccgtaggcctgcaaatattcctgcatcactccgaactcttcccgataagcttccgctattttcttctgtcggccggactcgttcagctcacgggccttgtctatttcggactgctgatcttccgacagcgaaccggactgccccgctttcgcgttgtcacgtttccaaccggcttcctgcctggctatttcatccttgcgtgcctggtattcattgtctatctggcgcagcttcttctccagcccctcggtcatcatctcaatctccgcctcgtcattcttcctttgcagcccggcgagttcctggcccagcttttcagaaacctgtttgcggcgttgggcttctttctccgccttgtccgccttcttccgttcggcctcggaatccttatcctcaccgggcttgaccttgtcgtactcctttttggcggtatcgacggcatccttcagttctttcgccttcttctcaaactcctcacgggaaaggctgttggacgtttcctgaagaaaggcgttataagccttgagcgcgtcctggtatttctcttttgtcgcagccacccagtcagtgcttgaatccgtgggcaggttacgccggttttgttccgaaaccagtttgttcagctgatacttcagttcgtcacgggaataagttccggtaagattttcgtcaccctgcgtaatctttccgtattccttctcctggacagacatccgggcaagcagggttctacgctgctttatctgctgtacaagggtctcgttactcacaccggtcaggttttcgaaataggcatttacctcgtccttgcggatttgtccgttcaggctcttgcgttttccgtacagattctgaagctctgcctcctcatcccttgaacgtgcggatttccggacatatcgggctctttgccgcccgtagctgtcctggtaatattcggttgccaaccgggtcttgccttcaagttcttttatcctgtcatccacacgtttcaattcattggcgggattggatatggactcaccggcttccaatcgggctatctcttccttgattttcttgatattcttcagtttctcatactcggtgtcgtatttggagaatatatccggatatttctgttccagcttgtttagcgcctcacgccgggcatccgtggacacggcttcatccccggcaatggaacacagttcctctattttgcgcctgtgctcttcctcggcctctatggttttctgcttctgctgctgatacctttcctcggattcctgcaaacgttcggtttccgtcttcatggagatcagtgccacggcaacaccggcaagcagggtcgcaaccagcacatagggattggaaagcatggtccggttgagcattttctgcgctttctcaaccagcaggagccagttgtaatgcaacgcctccgcagccaccgcccagcctttcacggccgtgactgtcatgacggcggtccggtacacaccatacgtgccgacaagcccgagcaggatacggccgaaacgttcgtaatgctccaccatgtaggaaacaccggaaagcgtggtgttgatgacaccttccgactgctgcccgatttcattgaacatcattgaaacggcatcctctatattggagatctgtccggttatcgttttggattgtgcctccatcagaccaccgaattttccgccctcgtccgtcaggctctctatgaccttctgcacttcgggaaaaccgaccttgccttcctccacaagctccttcaccttgctttcagccacgccgaactgcttggccagttcggcgatcatagggatgccccggccggtgaactggttcaggtcctgtgtataaagccgtccctgggacatggtggtgccgtaaagatagaccagatcgttcaaagggatggaaagtccggcagcgatgtcacccaagcggatcagcgtctcgttcactttctccgctccaaacccgtaggcaagaagctgcttggcaccctgcgcgacatcctccaggccgaaaggagtggtcgcggccgtatgtaccaactgctgcatcagggtgtcggccttctccgcactgccgagcatggtctgaaacgacacctccagctgctggaactcgccgcgtaccttggtgatgttcgacaccagctccttgatagtaaaggcggccgccagcttgccgacggtgttgttcaacagggaaccgctcctgtcaagttcccggatctgtctgttggcggacgatgcctgctgggacatccgctcgatcttgcccacggccttgtcaagacgggcgctcaaatggtccaccataaggaattctatttgtaccggtttcatctattttagcttgctttgaaaaaatcctactattccatccgcttcatcctcggcgctccgctcatccgcaggaccggaagatccggacttgtcacggacataccggggagcgtcactaagcatcatgatcagggtctggtaattcaccttgttcagtatatagtccacgctccagccggtggcactggcaatctgccacacaaaaccgaaagggctatgggagccttcataacggctctttaactccccttctttctttggctcagtctcaagctcatcggattcgtccgctcggctgatctgataataggtataaaagggtcggtacccatcaggctgacaaaacgcttgatcgcacccaccagataacgctgttccatgaagttccttatgagccatgccaccgggcgcaaaagcacgcggcggctgaaagggccacgacaaagggtataggccaccatacggctcaccgccttgccgtgagaggccagaaactgcatttcctcctccttgctgaacccccacatctcctcactggtgatccccatcgacaaatatgtccgggcaaaaagaatctgaccggacatataaggccgcctcatggtcacgcgcagctccagcggggatttcctgaaagggatatgaaacgctttcagcgggacgctcacaccgatatccagcagcgcgtccgcaccctcacgctggatctgcttgatgacagcttcgtccatacgctactcctcggccaggttagtggaagcagcggcggcagattcagcaggaggcagtttatactgtttccactcttccgggatagaatccgtattgaatacgccatggggctgggagccgtcttccggcatggccacttccagcgtgcattcgattttcgccgtttctgtcagggtcagcttgccgccgagattggaaagtagcgtgccattgggaatcaggatgctctgccccgaaacaagggctatttcccacggaccggtcagcaacacggctgccgtcggggccgtccaaccaatcggggttttcttttccgagtcctcttccttgtagtgcatggtaccacccagcaagctatgcaggttttcgtagttcagctggataacgttgaacgtgggggcgatgctgccattcgactggggaatgataagcaccggggttcccggcacctgctccgcctcgattttggcggattcgggtttctgcccgcccatgtcaaacgaattcttctctatgtaacccaccacaaagtccttgtatttcacggcaccgacgccgtacatgaaattcttattcattgtttcttgattttgaaagttaatactatgccggcaacacatccggttataaaagcggccagcgctattttaacgggactaaagcgacgttcaaattccgtttcaactgtgaatgagtcctcatgtgtctcattacggatacgggtcagttcctcctcataacacagtaccagccgctggaggctgtcgcaggatgcctccgctatgatattgccggccgcatcgctcttcaccgtcaggcccgcctgcccgttcctggaatggtaggacgaaccggagggaagtttacggaggctgtccggagggatcgtcaggctcaccgccgatttcggaatccccgccatcaacaacccccgcctcacgtttgacacgttgtcggcgcttgacgacaggctgctgttccggttcacctccgtcctgctctttcgagtactcgcgcatcccgtaaagaacaggacaatcatcatgatgcctgcaactgttggcagtatcaatggctttccggaggcgtgccatttcacgccgggtcgcctgcaaagctttcctgttttcattcagttcctcttttaagggttctacaatattctcgatcaggatacgggtggcatgttcggtattgtcaatccgtaccgtctcggcttcggcggtagccttctccgctttcgccctcgcttccctgaccgttgatttcagggtgatgatggctattatcgtggctaccagaccaccgcccagcaccagattcatgacagcactgaagtccatacgcacactggtctttcaggtcaaagcctatttaccggcatccttacccgcaaacagtccgatgagccactggacaaatcccgtatcggcaacaccattggacacaagggacgcaccgaacccgtaacacaacgcgatataccacgtggcatcagcgacaaagcccgcatccagccaccataaaagcatggcggccacaatgcccacacaccagctgacaatctgtgtcgccaagccctgcatttttggaaacagagccttgatcccttccgtgagcaacaccacgccaccgacaaaaccggcaaaggtggtgatcatcgcgctataatcgacttccggtactgtaccggtctgggcaaaagttgctgacacgaatccgagtatcagcacaaagaataaaagaaatcttttcatgttgttgttgatttattgagttatacctatttgtttaagccatctctgtacatcaaaactggggcaggctttggccgccagttcattgtgaccgacgattctcacatcgggaaaacgacgatggaaatccttcacgtacttctcaagcgcctttttctgccaggaggtacgggtgtccgcaggcgttttaccatcctttgcacacccgccggcatagacgatatggcggctcacggaattgtaaccggccacgccgttggtcacttcccacgggtccacattcgcgtcctcgttattgttcaccaggcgttccactccgccgttcagatggaacaggtcggtatatccgacctgcttccagccgcggccgccctttgagacggggttcgtatgccaggcgcgaatctccgcaccgcttacctcacgcccttcaggagtggccgtgcaatggatgacaagatacttcagctttcccatcactcaccgccttcctcttcatcaacggccgcctgggacagtgctatctccaccttcttctccggatcggcgtccaggcccagtacaagtgtgccggataccgccttgccgctactgttcacaccggcggtgaccgtcagagagccatcggtaccgactgccgtgaaaccggcaggaatggaaaccacgctgtaatcaccggaggcagtgaccttcacctccttgctctcaccggcggccttgaaagaaagagcgtccggatcggcagaaatgctgcgttccaccgccttgaacaccggagtctcacgggtgtcaagcaccacgaactcctcgccgaaggcgatttccgtgtcggccttcataagcagcttgaagaagtacagctcgctggagttcatccacttgtcaatctggatcacctcctcatcgtcctggaggttcacaccggcaaaaaggttgccgtcagcgctcatcgagcagagcgtggctacgataaggccatcaggccaggaattcagcgtctcgatggtgatacccttgtaacgcttcttgttgatgtccgtctcgctcgtgttcttgtactcgcgttcggtcagctcgtcatcgtacttgtcgaagtcgtcaatactcatcaggatacgcaggttcggattctcacgcagggcttttggaatagccttgcggacagccttcaacttgccgatcatggaagtatcggaaggagccggaaccacgatcacatccggatctttagccgcctgggtcaggataccgttgaaaaggtggtcgtcgtccgaaccgaactcgccgttcaggtaatgccagcccagctcgaacttcacactcttgctaagttcatccagaagcgtgttctgcgcttcggggggaagttcggcaaacacgaggttgcccttcggctgccacttgcgccaaacatgctcgaaggcacggggattgaaagtcgtgaacgccatgaagtcctccggatccagtgatttctccgagtaattgaaattgcctttcgagtcttccaaagtcgggttctccttacgcttctggagcatcttgccggtcttgatacgcggcaggctgatttttttctccacaccggggatcaccatgatcagacctttttctacaaggtcattcccggtggtggccaggaccagtattttctccagtacctcgccgttgtaattcgtgtttcttactactattgccatggcaaatgtttttatttatggttcaacttgtccttaatctcgctcatgcgcttgttccaggggctttcacccgtcggattcacacgaaggtcggtcatgacactacgtttgggggaaagcttctccaatgccttttccccgttctcccggtcttttgccagaaggttctcatagatggggcgggtggcggcatcgatacggccgtcctgttccgcatcatcaagcagtttcttacgcgcggcagcgtcatccgcatccgccttgtcctggaacaccttcagttcgcccttcaggcgggtgacctcggcatcaagggccgggactttgccagcctccgtttccagcagtccgatttcacgcaggaaatcgtcatccgtcgcacagttcttgaaccgcggacgtctcttgagttcgtctaaattcatgctattctcgttttgtggcttgtgcagccggttattgaatatttgaaatacttgttcgggggtactgtcctccggtaccgggtcagcgtcataaataccgtcgataagccccagcgccagcgcctcgtcggcacgcagccagtgatccttgccgtcaaaatacatcgcgcggatttcctccttgtccttgcccatacgggtggcatacatctcgcaaagggtatcctcaagcgcctcgatctcacggatgcagtccttcatctcatccttgttgccgtaacagccgccctggacactgtgaagcatcagacgggcataacggctcatctgcacgggcttgccgcaaagggcgatgacggaggccatgctggcggcgatgccgtccacgtagatggtaatgtcggccttgctgttcttcaaggcattgaaaatggcgatgcccgaataaacctcgccgccgttgctgttgatacgcacgtccaccttcccggtcagggcttccgcttccagaagttcacgggcaatatcaccgctgcgcacgttatcatcgtactcaccgatgtcaccgtaaagaaggatgcaacaggcatcggttccgggtatcatattgaaaaatctactcatgtcactatcgttttggcaggtccttccctgcaaagtttacggtgcgaaattagggggattaaaagcctttttcaaaccgcgttttcatcatggagactttaaaggattgccatgacgctttaaaatgtcatcatgcggagcgcgttttttttcgctccttttccttatcaattttgcacgtaaaaaaggaggtaatatggccgaacttacaaacgagcagaaaaaggcatgggcgaaaacgctctacacccgcgaaacgctcacgcaggcggaaatagccgagcgtgtgggggtttcacgggtgactgtgaacaactggataggcaaaggaaactgggagcagctgaaggcttccataaccatcacacgggaggagcagctgaagaacctgtaccggcagctggcggaactcaacaacgccatcatgggaaagccggaaggggaacggttcccgaacgccgcggaagcggacaccatttccaaactgtcgaacgccatcaagaaactggaaacagaagtggggctggcggacatcatctccgtgttctccgacctgctcaaatgggtgcggacctacgattccacgcaggcgaaggagatcaccccgcttctggacgcgtttgtcaaatcaaaattatcctgacatggcaaagaaaagactcacaccccaggacaggatcgcactggacaactggaacgagctggtggcatccgtgcgcgaacattcggacatcaaccccacggacacggaaacggaaatcaggcagaggcgggaaagactggagaagaacgacgaggagtggttcaaatactacttcgccatgtattgcacctgcgagtccgccgccttccacaaaaaagccaccgggcggctgatgaggaacaaccgctggtacgaggtaagggcctggtcacgcgagctggcgaaatccgcacgctccatgatggagatatccaaactggcactgacaaaaaagatacgcaacgtgctgctgatctccaactcggcagacaatgcggaaaggctactgctgccgttcatggcgaacttcgaggagaaccagcggatcatacaggactacggacagcagaaaaaaccgggagcgtgggaaaccggggagttcacctgcatgtccggatgctccttccgcgccatcggagccgggcagtcaccgcgcggtacgcgtaacaagaacttccggccggacttcattctggtggacgatatagacaccgacgaggagtgccggaatccggaacggatcaaaaccaaatggaaatggctggaggaggcgctgataccgaccatgtccgtatcgggaaactaccgcatcctgttcaacgggaacatcatcgcgccggactgctgcatcaaaagggccatcgaaaaggcaaccgaactgaaggcgaaaggaatcgggcacgtggatatcatcaacatccggggaaaggacgggctgtccgtatggcccgaaaagaactccgaggaggatatagacctcttcctctcactggtcagcgcggcggcggcacagaaagagttcttcaacaacccggtggtggacggcggcgtgttcgcggaaatcacctacgggaaagtgccggcactttccaagttcaagttcctggtgatatacggggaccccgcaccgggagagaacaagacgaaaaaaagttccaccaaaacggtgtgcctgctcgggaaactcgcgggaaggctttatctgataaaaacgttcctggacagggggctgaacgcggaatttgtagagtggtacatcaagctgctggagttcgtgggcgggaaaaccaccgtatactgttacatggagaacaacaaattacaggatccttttttccagcaggtattccagcccatcgtgcggcggatacgcagggaaaggaaaatatcactgtacatcgccggggacgaggagaagaagaccgacaaggccacacgtatcgaggcgaacctggaaccgctcaaccgggaggggaacctggtactcaacgaggccgaaaaggacaacccgcacatgaaacggatggcggaacagttcaagctgttcaacctgcaactgacctatccggcagacggacccgactgcgtggaggggggaaacagaattatagaccgcaaggccagacagtcggaaaagcccgtcattgtcacaaggaaaagcacgcggtcacaaaacaagtacagagtgtaaacttcaatacctatcattatgagcaaatttatcgaactttcagactacgacgcgagcatacaccgcgagattctggacgcactgacaagggaggacgacgccgtcgtggagatatgcgaggaccgcgccgtcgccgagatgcgctgctacctttccagacgttacgactgtgacaaaatattcacggcaaccggtgacaaacgcaaccagcttgtcctgatgatggccatcgacatagccgtgtaccacatcttctgcatacataacccgaggaacctgtcaccgctgcggaaggaacgccacgaaagggcggtcgaatggctgaaagccgtggcggccgaggagatatcggtggacggcctgcccctgctgtccgaagagacgagggcggcaaaatcaaatttccttatcaaaagcaaccgtaaacgtgtaaaccattggtaatatgaacaaaagaaagaaaggggccggaaagataacccaaagcgggaacctgccgaggcccgggcagaaaggacccgcaaccatcatactgacacagcccagaaggttcggtatagacatagcggactacatgctcgcggtaagggctttcgagaatgtggactactccagacgcttcaggctgtacgacctgttcagcgacatactcatggacacgcacctgacaagtgtcatagagaaacggaagaatgccgcactggcatcttccatagaattccgcaggaacgggaagccggacgagaaggtgaacaagcagatcaggtccccatggttccggaagttcataggggacatcctggacgccaaattctgggggttctcactcgtgcagttctaccgcaagggggaatgggtgaactacgacctgataccgcgcaaacacgtcgatcccgtgcgcaggctcatactgcggcaccagacggacaccaccgggacgtcctgggacgagtaccccgacctgttgttcatcggttcacccgacgatcccggactgctggtgaaagcagccatctgggtgatatacaaacgtaacgacgtggcggactgggcacagttcgcggaagtgttcggagcgcccatcagggagtacacgtatcccacggatgacgacgaggcacggcagagggcgctggacgacgcggacagcaccggaagcctgtcggttttcgtgcacgcggaggatacggtgctcaagctcgtggaagccgcgaacaagacagggagcgcggacctctacgacaagctctgcgagcgctgcaacaacgaaatctcaaagctgttcctcggaaacacgctcaccaccgaagcctccgacaagggcacacaggcactgggaaccgtacacaaggacgtggaggagaaagtgacgctctccgacaggcaggacatcctcgacgtgctcaactatgacatggccgacatattcgcaatgctcggaatagacaccacaggcggggagttctgctatccggaaaagaagcttatcgaaccggagaaaaagatgtccatcctcacacagctgcgtacgaacttcaacctgccggtaggtgacgactacctctacgaggaattcgggatcgagaaaccggcaaactatgacgagctgaagaaacgccaggaggagaaagcggcggaaatcgaggcggcgaaggcccgagagaccgaaaaggcggaagaggatgaaccggatccggaagaagaaccggaactggaaaagcacggtaaaggaacacccaaagaaaagaaaaatgcccttaaaaacgcatacaactggctgaaacgttttttcgggaaagccccggggagagacggggcagctttagaatggtgataaacgacctctacagaatggaggacaaacaggtggaaactttattctcgttcgatgaagaggtactgaagaaagccctgaagaacatatacagcaaagatttccatcccatgaccgacatcgaggagaacctgttcgaggccacgtggaaaacgatgaacaaagccaccgacaaggggtttgggacacggaaaaccgatgatccggattatgacttctaccgtgaaatccgaatgaacaacgccgtgttcgcagctttcaaggtacacagggcacagaacgacatggcagcgctgctgctggacaaaaacggaagtttaaagccgtttgaacagtgggtgaaggaagccatgcccatagccgaccaccagatgatccattggctgcgtacagaatacgacacggccgtcatacgggcacaccaggccgcggactggagacagttcgaaagggaaaaggacgtattgccgaatctcaaatggatgccgtccacatccatacatccgggagccgaccacaggattttctgggggaccatacgtccgatagatgatccgttctggaacgagcacaagcccggggacagatggaactgcaagtgcacgctctcatcaacggatgaagcgccgacagcggtaccggacgaaaacgggcagaacaaggcacatgacggtctggaaaacaatccgggaaaagacggcaaactgttttcagacaaacacccctacgttactgaagcgcatccgggagcaaaaaaagccgtggacgcactgaccaggcgcatcaacgaaatgatagccgaaatgccggacaacctgacgctggaggaaaaaaccgacatcgcccgcaacaatctcaagatagaaaaggcactcggcgttaccaaaggcaagccgatgacatacgaacaggcgaacaagggaaaggagaacccgaaattcggaaaagaggaaggataccgcgtgaattgccagacctgcaccgtgacacacatgctcagaaggttggggtttgacatcgaggcaaaacccaacatcagacaaagcgcatacaatgaaatggcaaaacaaggtatcacatgggaagaacgtttcctgaaccgggacggaacaaagccggattatgactatacctataaatggcaggtcagaaagggatatcaagtaatgaatgcaaaccggctgaaggaatacttcagggaaaaattcagagaggatggaatatacgagatatattgtgcctggaaaggcggctccgcacacgtgttctgcgcagaggtgactgaaggaaagacaaggttcttcgacccgcaaaccggaaaggatgatgcaagcaattacatacagagcatgaaagcgggccgtgtgggagtgataagaatagacaacaaactggtaaatcccaaaatcatgggactattcatcaccaaataaacgggaagaaagtgccagcccctcctcaccgtccaccagacggcaggactggccgtcgaacagaataaaggcgggaagaccgacaggcaactcaaaaccatccccgtcaacacagcccacggaatagatgcttccttcaggggaactggctgataagacaacggagttgtaaccgctactgtttgctaattccgacacttgtttaggtatttccataacgcaaaaaggcacataaaaaacgccttgctgcaaaagtataaaattattttttaattcagtcattcatggacataaaagaatattcaaaactgataaaagccaaacggaaagaactggatgggctaatgaaacggaaaatgccggttatcgccggacgaatggcaaaagaccatttccaggacaacttccgccgggaaggtttcgtaaacggaggattacacccgtggccgaaagcgaaaaggctgtcctcgggacggaccgatgcggcagggagctacgggacgctgctctccggaaggaaccatctcttcagctccgtcaaatacatgccgggagaataccgagtgagggtggcaaacgaactcgtctatgcgccggtcaataactggggaggagaagttcatccgactgttacgccccaaatgcggcgttttgcatgggcgaagtattaccaggcttcaggcaaggctaaaaaagccgccacgggcaaaagaaaaggcaaaaagaagggttctgccgcaaacaatgaaccgcaggaaaatcaggaagcgctgaaatggaaaaggctggcgctgaccaaaaagaaaaagctccggataaaaataccgcaacgccagtttatcggggaaagccgggaactgtccgaaaagatagaccgtaaaatggagaatgaaatcagaaatattttaaacttataacaacatggaagaaatttttatcgcgatcatggaacgcatcgccgaaaagatgcctgaactgtcatacattgacgaggactacggacagcttgaagccggggcggaggaggaccactatccggtaaccttcccctgcgtgcttgtcgggaacgccgaatcggactggaatgacctcggttacggggtacagaaaagcgagtcactcatcaccatacgactggccattgactgctacgatgacacccactacacctccggaacctatgacaaggtaagggaacggcagctgaaggccaaagagctgtacaaagccttgcaggagttccagtgcacggaagagaccagcccgctggtcagggtaaagagccgggactattcgctgccgggaaacatcaaggtgtacgagacggtttattccttcacgctgcatgacgagtcggccatgcagtaaggggaaggttcattcccccgtgaacagggaaagctggatggctgtcaggcggggtttcttaacctttgggacgggcttcacctccaagtccttcagttcccgacacttgcgccggataatggacatgatccgctcctcggaaatgaaaaactcctgccgggacaacactttcagggcatcatcaaaacgcaggcgctgcacctccgtccagtaatagtaacggcggcacaaggcttcatcacggagttctatcaggtttttatctcgtcctttggccataagttcaggtatatgctgcaaaattaggcatttaaccggggatgttaataaaaaaacgccgcatcgtgtatgaatgcggcgtttttctgtttagagtgtgaacaaaatcacatggtcatcagttcggtgtcatcctcacccgggacaaacggctcgatgcgggtgatcaccttgctctgtaccttcacccgtccgctgccattacagaccggacattttgcggataaaggagctcctccctggtccaggtaaaagatacgtcccttgccttcacaacgcttgcaggccatgacgtgcggcgcgatgttcttcgtcttttccataactacaatcggcagaatgaaggctcgatacggcgccagacaccgttctcgtcacgtttatgaaaatagtagttcaccgcggtcttgtacaccacgttgctctcacggaagaggtccatgatctccgtgtattcgctgtcgaaacggtcctccagctcatacagcttgctcaccgacttgtagtccagatcaccctggcggttacgctcgatcatagtcataccgagctggtacatcggatcatcggtaccgagttcccggctcatggcgtaacgcttcaggtaatccaccagacgctcggcggcgaggttggcacgctcgtcgaagctcttcaccttgttactcctcacttccagcttcatgtcaccgtccacgatggtgaaactcgcctggtcatccttgcgaagttgcccatagtcacgcatcaggtcacggaaagaggcggcttccttctctacccagtcacggaaggccttcacgtcatccacaactggaaacagcctgttcttcacttcaagcatgaactgcgcacgaagcccttcgtaggcatcgcgacgattgcgcttgttttccttctcttcctgctggagctgtttcaaaagctccctcctgtcctgggcggacaggctttttaattgttctttcaagtccataactgaaaaattaaatggttgctattgttgtttattctcacgtttacggcggatggcacgcagcttcacctgcaacgtgtccagtgcctcacagtcaagttcacggaactccttgccggcgatacggctgtcccggcagaaggcgttcacccggtcccagtcggccgtatcgatgcccagcaactgcatctggtgaagcaccgaggaacgcttctggcggagaatcttccggagctgttcctggtaagtgggcggtaccagcttctgcatggcggccacggcggcgctgtattccttcagcgtcatctcgcgcaggctcgtggtgcggccgtccgtgtactgggaaacgatgctttccttcagtgcctcacgatccgatgtcggaaggcggttcaaaaggctgtaaaacgccgcataattctcgggtttatttaactgcttgcggctgttgatgtctatctgcatggctatactgtttttttgtttattttaaggtcattgatttccttaatcactctctttactctgatagtacacaaataatcaagaagatgctctttttcatttttttgtacacttatactggtcgaaaaattcaagtatgcccattctattcagattttcattaactcaaactattcataccacatcagcacaactctatgatttcacccacggcagagcgtagaagagtacgcaaaaccgaagggtttccgctatcatagatgacttccacacaacactcatggcgtgcgttacgtgacacaaccagctcgcaagtcatattctcacagagccatttttccactactttacggacaccaactgcggtgaccacaattaccatttttttactcataatattgaccgtgctgtatgttattcaactcttatcctcccggtgtactggtttccccgaaacttcatccccttggtgaagccgcccggatatcccagttccttgcttctcgcgtttgccagcaacaaatgttcccggctaagggaggctacaaaacttttgtccttttccagtcccatctctcgggccttccgggtgacgctgcgttcggaaacaccgagcatttcagccagctcccggttgagggtattgtgatagtggcgccgcatgatggaaagcatattaccgttccaaaagatacgggtggaatatcccttatgctcgacgagccgtcccagtgtccggtgcatgaaagtaccgtcagcaaccttccggtgcttgcggtactgttcacgcttgtacgccagcacacattcatgacaccaggaactccgtcccccattcttcaacggatagaactcacgcatccacaactttcggccgcaatgcggacagacacgtttacgtttctgcttgttgttattttcactcatagctgtttatgctacattcatcagttcatattcaaattttcaccgaacggaatagtattaatgtcagtctttctcgtgtaggcctgcatgagtgccatggaaagcagcatataaacacggctgtcggccttgacagtccccgaaatggcgccgacaacatactcacccttgccggtgatgatcgagccggctatctgctcaagcccgtccggatggtcctcactggccgcaacgctcataaaggcactaagattattttccttacaaaagttatccacgtattggcagagttcctttactgcctctttctgtttttctgtaatcatttcagttaaattttaatggttaataattatatgttgaaatagcgaaatctctttttgagcactgctcgaacatcgtctcctcccagtccggctcgttctcctccggcaggtcgttctccccgagttctatttcttttcggtaaatgaggtaccgtgcctccagaaagaagaggaccacgcggcgcaggaactcacgggcggaggagatgccatgcctctccatgaaggcggcgatacgctccgggccgatggtgttcgtgcggatactcaccagacactgccggcggaagtccttcagcgtgctgccctttatcccgagcacgctgtcagcgatacgaccgaggttctccgggatatggtaaccggaaccgtcatcatccgtccccaccagcagttcggcggcggccgtcagcataccctccacgctcatgcgctgggcggcggccgtctccttcaggaacacgtactggtagttgctcacgtaggtatgtatgaggtagccttccgggcggcggaacacctcttcggaggcaagctccatcgaaaggttgttcaacgtcacaccggcaccgcaacagaaggcgcacaccaggcggacggcaagacgctggcggttgccccaaccgccggcgatgatggcacgctgcaggctgccggcaacggccggatccatctcgaagaacagcaccgacttctcctgacggcggaagaagaacgacatgtccggaatacggtccatgcagaggaggatgcgccgggtggccgtggagaccctgccaccatccgtcatgcggatgtaggacttcaccaggtggttcatcactaccgtcatgtcggaaaaatgatagtcggcaaccttcccgcggaacagttcatgaagcagaacgggcagcttcacaacgtagttgtaatactcctttctcatggctcacttgcttgaaggtttccagtccactgttataatcgcatccagctcaccgctgccgccacacaccgggcaggacacatgcacgtcctcgcggctgccctcttccgttccccagaaccagccgttgcccttgcagtaaccacacttgtggccggtactgacgaagttctcacggttaggccccttacacatataggcgggaggacaaatctccagctgtttctttatcccgctcatgcctggcctcctttctgtttcggtcccgccacattccaatagtcataggcgcccttctcccagattgtgtattcaccagtggccccctgataacgtcccttactgaaggcgacgtagccctctacccatatcttcaggtcggcatcatacatcacgctcgtggccgcatcacctttaggattcttgccgcgggcatggctgatgaaaacaaacagcttgtccggaaactcctccttcagctggatatagtcacgatacgtcatctgtgtgtattggaagctgtcaatgatcacgatgttgaaactcttatgacgccggagcctgatcttcaaggtggggatgtcctccttgatgaacgccaaatggcggcttacctcggccataccaaagcgccgcaggttattttggactgtcagagaagttccttcctccagggagttgaacgccacacggtcatacttgcaaagttccttgcagagctgcatcacgaaagaggtcttgccgttaccactgttgccccacacgaaccagcagccccggacttccggagtgtcgaaggcatccttccatttcccctcaaaagggaatacgtcatacttcttgttcagaatgtccctgacattcaaggcacgtctcatgcccgcttttttattatcctttttctcttcttccatggtcagaacagttttagttgtcggatattgtctatttgatcaagcacggcctgccgtgcggcaccccgcagtttctcgtggcagagcatcctgccgagtgcccacagaagggcattctcacgggtggagaactgtccccatttacgtcccgggttgaaaccgccaccggaaccgcccacctccatgtgaacgccggcaacccaccagccgtcctgctgtcccacaagggcgtccaggtagtcgcgaccattccggtaaacggtcaccgtctcgtattccctcaagactgggtaatcgctccagggagcgggaagctgctcgcgaccgtcgatctttaagtattcaaatttgttttccatatccttaaaattacgtttgaacggtatttgaacgggagtcattcccccgtcatgcgtttcaccttgtgaatggacttcctcacacgccgcaaatcaaagtcacatgtcgaagcctcctttatcaccttatcgatgtctttcttgtcagtcacaccgttggcggaacagatcgcgaacacgtcgttcacgtctgtaggctccagctcataaaatttccgtccgatacggctgtagaactccttgtagccgggcttctggtatcgcagaccattgctgatgcgtttggcaatataatcggtactcaaaaacacgacgccgcatttctcctccagcttgttgtacaggctgatgaagtagtggaacaccggttcggtcagcttgtccgcctcgtcgaacaccagcaggggcgcgtccatctggataatgtcatccaatataagcccccacacctcacggatattatacccttcggtccggattccgaccgtacgggcgatctcgcggacaaagtcacctttcttcatgtcctcagagcagaggatatagaaaacctccttatgctcctggaggtaaacacgggcggtggtactcttgccacaaccggcctcgccggtcacccaggtaacattgcgccagcgttgcgcgtcagagagtacagccgtgatctcctggtaagcacccgtctccacgatctgccagccggtagcgcttacaccaccgacctgcgaggcgacattacggaacatctcgtcgctgatattctcataacggccgttcaggatattgctcacagtacccacactgactcccttcagactacccgcggccttcgtctggctcggatacttcgccacgtaagcccggaggctctcactgatggcgttcttctctttcattgtaatttccataatcaatattttttatcttgttataaatctgttccttataatttcccgaccaccttgcggatgctcacttccttcttctcaaagctgtcccatgtcacgttgctgatgactttcatgtcacggcctatggaaggacggggcggctggctgtattttctcgtgcggcggtcaatctggcgttgcgcctcctttccgagacctttcaggtcaggagtacgcaaaccgttctgttccggtgcgacaccatgctcatactcgatatctttggcgacgacctgacggtttatacgctcattgacgacggcctcctgctgggtgcggatgaaacgtttttcggcttccgtctgctcctgctgggcacggtggatcatcagcgggaacgaggccacacactcgaaacgcatcgcaccgcccttgtccttgtaaagcaaccgtacgctgctcatgtcatagggatcgtactggacatagaacttcttgtaggtattacgccggcgccattccaggtcaggctcaccgggagcggagaaaacctcgtaagggtatttctttccctgtaccgtgatctcgataccgctggcggtgaacagcgacggtttatcggttgtgtaccagaacatctccaccatatcaggaacgctgaccggatcggtgccctcgttcacgctggtattgtacatctcaatacgggggatgccagtggccgggtgcttcattgagttccactgctcacgggcggcggcatactgttccttcagttcctccaatgtgggaagggagtcgatgttcgcgttgatgaattccagattcggacggcttgtttctctctttgccgtaatattctgcccggtgaaaccgaaacgtttcttcaatacctggctctggaagcggtagaaaatgttctcaatcgtcttagattcgccattatacggagctgtcgggcggtggatacggctgatcttcgagaaaagacccagcgccgcgttcttcttatgaccgccctggttgtcgcacacgatctcgtagggtttgtgccggctcgtttggatagccatgcggaaagcatggtactgggcgatatagtcctcattatcgctgatgtaatagccaagaagcacttcgctgtaagcgtccaccacctcgtacacgcttgtagtgcacttgttcccgttctcatcacgatagtagaggttcagcttcgtgccgtcgccataccagaggctgtcacggcggcccggaaggatggtgcggtgtttgcggtcataacgctggtgcgccttcatttccccataaacggcatcgtaccacagaggttcgacacgcgggctgctgaaccattcgcggaggctgcggggactcttcaggggcttccagccacgttccggagcgacacggttgtactcctcgaagatctccatatcagtataaaccggaacacggctgcgtttcaatgcaacaaggtaacgcccgccgtcctcctcgatcttcagcgtgttgctgttgccgtacttgccgctcacaagcacaccgtagttgtcgggacggaacttgcttatcagggctttcaaccggcccacactgcccgggaggctgtgcccgtacaccggactccactcctcactcgtgacaagcagaagctcccaaaggttacggcggaaaccggtcagcttgttattggatgaactcaagcgtttgaactcttccatcagcgcgttcagcaccgaagcgttccaggtgtattccttcttcacatcctcgggaagggcgaccagctcaccgttcttgtcgtaacggtactcctcaaaaaagcgctcggccttctcgtctttcttcactatgttacggatcatttcttctcgcatctgtttctcgggctcgccatggcgctcaacccaacgtttcttgtatttctcgggaagggaagaataggaatacagggctacattgccctcgccaccgccacggttgatactttcgatgttaccgcgacggacattttggtataaagttatatacttcatcaccggattatctcctgaagtaagctcttcacaggttacacacagtatattattatagtattccattttccgttctgttatcagtcctccaaatcattcaaagggacatgcctcttcaacagccgtactgaagccccaaagttcagtacaacaaaaagcgcccaaagcaaattgtcttcactcacagaaaatatcagacagaaattcagacagaagtaaagtacacaaaggcgctgcttccagttcaagtgtataaaccagcgcagctggtcaccgaacaatgccatcaactcacttttcatcgctttccttcttttcagggttaccacctaccttggttccaccgcgctcgatggcgagcttgcggatggaacgggccaacttgctgttcttgcggaatgcaagggagtgggagaccatttcccgggaacaacccagcaaaccggctattttacccacctcactgtattctaccactattcgttctttcataattcgctgataagttaaattattgtagcgggcagtcgcggactcgaaccacggaccatggcctctcccttgcgggagtttggcgtgttctaccaactgaactaactgccccggaaatctatcggagttcttgtatggcatcctccggaacacatatcacagtccaaacctggccatctttcatataatcgacattatattcacgaccgaaagtacaaatgttatagtcccagtcgcggattacaccatcaatgacttcaccgttcctcttggtgattctcacactttgtccctttttaaattttgcttccattatatcttcgttttaagtatatcaatatcaattacatccaacacgttagatgttcttaggctattcacgataagggtggctaatactatactgttttctgccatccacctctttgcttgcctgacagccacttccttgctgtacccatccggaataaaagcccccaggtcattataactccgatctgtcaattcaaaataataccgtttcataaccttctatttttcttctttttatatttctcattgtcacctcaagccttttttgtagctttggggcggtgttcacactttgaacacgtggcaaatataaatcatctttcgcaaattgcaaaacaatctgcgaaataatttcgcaaaatataaaacaatgaataaaaaagaaagattagaggctattataaagcattacagtgacggaaagccttctgtttttgcaaagttaataggggttgctccctcaactataagctcgtggctgtcgcgagacacacttgactacgatcttctttttgcaaaatgcgaaaatctgtcctcagaatggcttttgactggtaggggagagatgattaacatacaaactgccacttttaataatacaactaccctgccacaaaaagaaagtacgggaatagaagacaaattactagcaattatagcagataaagatgccactatccgagagatggcagaggaaataggtgcacttaagcaaacaatcgtgcaacttaaacaggacaatttggggcgtgtttcaggtgcggagagttcaacacttgcaggcgccgggtaaaatgcgttatatggggtgaaaggggtaaaaagcaacaaaacactgatttttagagatatgaattaaaatataggggagtaaataaatattatcaatgtattatttaccccctcaaatagtttaaaaacaagcaaaaacaagtcctatctatattatatagatagacaaatcgctaaaaaataatccgaaaatgtaaacccaagtgtaaaccctattaaaacgtttcgtttttgtaatggagaaaatgtaaacccaagttgtaaacccaagtgtaaaccctttcaatttttccgactgttcaaaccgttcaaagtaagtagcagcctcccattgatgtactattaccgacacgaatacaaaaaaagccgcaaaaagcggctttatagacgttctaaggctgtttcagccctttctggtgcatgttatcaagcgagactgaataatcattgcacgtttcgtgtatttggcaatgtcatcaaccagtccagcatgtaaaagactattcttggtgatcccgacctgttgctccgttagagtttcaaaaatggccgatatactaccaaaatagatgttctttttctcaaaaatcaaatgtacatggataactttactcataatatacggtatttatttcattgcaaatataccaaatatcatctatatggaataatttagataaaataaaaaagggaagtgcgtcaggcactcccccactccacttgcataaaccgatccgtttgactatctttgtatatgagagcgatctggaaaggttcatggagaataaccgatgaacaaacccgaaatctcccctatcccaccttcaatgtaaagcatttcatttgaacggcgttcaaacgaggctaaaatgtaagcccaatgtaaagcgatgtaaacgtttcgtttttccaagtcactctcccctacttcatcataacgctttgacagccaaagcaatcagtcattttcaggccgaccacatattgacacgtttcgtttttccccccttacatatacttcacaatagaactatataatgtttttttctccaaagaaggaaaaaacattgattgctcttatggaatatctgtcgtttttcttataataatcttccttatatgcctattttttagtgctttcgaaattagcattgggcaattactaattagtccgcaaataatattctattggtctattattttagctttcatgccttttataatggcaattatattggcttttatatttgcagtatttggttatgtttatagcgacatattatacgaacgaatagaatcatttgatacagattacaattctgaaataagaaaaaagggccaagaaccggtttttggatttggaagccctaagagtagtgaagggtttacttttaaataagtataaactttaactccaggattcaggttttatacttgaatcctggagttttcatataaatcatcactcactaatcatcctccttatcaaatccctattccccggatcatccgcattgatcacctccccatctccccgacctaactttttacgttcttcttcgctaagatacacagtagtaacagcatcggcaaacaacatattcagattgacatagctaattccccaaagtacgtagtccattgtccatccatagcgctggcaggcaaagtctatcagcagtccatagatactctttcccccgaaagtgatgctgctcccctctccctttatcctgctgattcgtgttttcatttcccggtctgcatcgataccaaaatatcggatgaactcttctatcttatcactcgaaaggataatagtcaaaatggtagccaaatcttccaccgacgcttcatcctgaaaaagcctggcacgccgaagtactttctccatatccagaatactctttctatcgttgaatgtagagtaagcaatgacctgacagacagattccgttttctcttggcagattctcagcgtctcaacaagcggattaatggccagaagctccatattgacatccatcgagagatacaagttcttcagtatttgcatcttacccaaagtagaaggatagagacatagtttattctttccgatactaaaactgatcgctttttccacgatagcatcggatatgttgatttcgatttctttatttatgttcatagcggaatttataaaagaagagcgccatgactagcgctctccattgacgtaaaaagaatcttattctgccggagtagcaggagtataaggtttcacctgatcaccggtggcaggtttcaatacatctaccgtgtatttccacttcttaccttcggcggtgtcgtatgattcttctacagaaaccacagaacgttcgatcaggataccttcgcatgtttcatcttccggagtaagacggaaagcatactcgccttcaactactccgtcagagtccttgatcggtttttcacgacctttagccgcacggatttcaaactcgaacgcataagtatttctggcatacttcactgcttcattttcgcctccctctacctttgcttctttcttttcacctttggtaggagtcagtttagttgaactttccaccgggtcgcaacctagttttgtccattctgacggtgcagctccgttcacacattttccaaactcaattgtgggttttccccaagataattgtgccataatctaaattgtttaaatttttaattaataaataatatataaaaaagctagctttaaactgttctttcttttgaatcacaggtcctgttttctaattcgctggtaaaagtaatgccaatatcaatgactggtaaattttcagttcccctagccgtgacatcttacccgaagtcataaaataggattttgaggtatgattccgttctctttcagacgactcataaattcgtcacgcaactgatcaatagtctttctatagcctttgtaagtctcataaaacgaaatagcatcgcgaagattggaaacagcagacggggaattaaaaccgaataattttgccagcctgtcccggacaccatttactattcttccgccaaccaatgtaataggagaataaaagaataagataattagcagaaactgtcctttctgatgagcattcagtcctcctgattcttcacagcaaccggacaattcacaataccatttatacagtatgggtatatactccaattctgttagtaaaggagttgataatgccatttccctctccatcaatctgagtttctcttcatgtattgatttcagttcttcaatttctaaaaattcctgtaacatagcctgtcgtttttaagattattactttattaactcttctcttatgtgagtttctttttctttctcttcgatgcgcttagtccacccccacatcatagcagagtaaatcgcattcgtgtacaaaagaatctctctcccactcgtgagaaactctaccctaaacgctgcattcctcgcaacggtccgcaaattcttttttatatccataaagacattcattttggttgttcaattcaataatacaaactagatgttgagaatattaattagcagtcaattagcatattatattttaaggtcgtgccatcttttcatctattgtatgcattgtttgttgataatccgataaaaatactatcattattaatgtttgaataaaatttactatgccaaaccatgacatcgaagacaaagtcacaaaatagatttattctcttgtaagtccggtacttattcttacctttgcattgtcttaaccgacaagatgtttttaccaattcataaggaagagttaattgtttttcccacactaatttaaaaaacgcccttatcttttagcaacttcatctgtatgaattaatctgttgcacttgagcaaccgtcctgttatacttgtgcaatattcctgttacacttgtctatcccggctattactcaactgcaccgcaaacaatggctattgaaaggagttattatgagcatactttacaaaacaacccgcttcgcggatacattcacaggagataaggagacaaatgtccgggtacaactgctatcatgggatacactggacaccaaagcattcgtagaatatctggcaaccaaatacaacctatccaaaggagaagcatacaaaagcctcagcatagtactagaaggaatggaggccgtactgaaagacggaaacatactcaatctggacgacttcggcagtttctctctaaacggaaatttctgtgaagacaaagagccggacgaaaaccacagggcagaatccatccaagtgaaaaacgtagtttttaaagcggacaagaatctgaagaaacgtatttcagctgccggatttgagaagtacaatccaaagaaacataataaacggaaatattaactgcatggaatacgatcgaatttactccatccggaaaggagaatactttgcggatgcgctaaaacgtgcaggaaaagattttattcctaccaattgcatcatcaacaaactgctgccgggactgggtgccacgcactgtgaactcacagcaccacgcaaatccattatcatcgaaccgaatgtacccgtcatcgagtcgaaagcaagggtacataagaatgcacttgctgtctataaaggtgtaagcatccggcagatcgccgactttctggaagcaaaccgggagaaggattacaaactactgactactcccgaaggcttcaacaagataaaggaagccatgcaaacggtggatatagatatgtatacggaatgcttcatcttatttgatgaatgcgagaagctggtacaggacgtacactatcgtgactctatccgcgaaccgatgaatgatttcttccgtttccagaacaaggcactgatttccgctacgcctatcgtacccgaaaaggacagtcgttttgacggtttcatgcgggtattgattcagccggattatgtctatcggcagaaactgaaactgattactaccaacaatgtactggaaaccctgcaggaagtgattgaagccaagagaggaactgtctgtattttctgcaacagtatagattcgatagacagcttctaccggttgatacccgaactaagcaatgcctgcacattctgtagcgaagacggacaatacaagctctggaaaggaaaccgccgcaaaaagtcaatgatgatcaccgaactggaacgttacaatttcttcacctcccgcttctactcagcggtagacatcctctgcaaaaatccgcctcatgtgattttcgtcagtgacttgtatggtgccgcgcaatccgttattgaccccgccaccgaggcaatccagattatcggacgttttcggggcggagtcaacagtgtgacgcacatcgcttctatccgaccggaactggaatgtatgtcttcttctgaaatcgatcactggattcagggagcttccaccattttcaacggctggaagtcgcaactggcacgaactaccaacataggcgaacgcaccttactacaggaagccatcggagaaaactcttacctcccttatctggacgaaaacggaaagccggattcgtttctgatagccaacttctatgaaaaggaacaagtgaaacgcttgtacacctccgccgatctgctgcaccttgcttacgagcagaccggatattttgtcttctcgcacgaagaacgcctgatgccggtttcggataatgaacgcatggctatccagcatcgtctggcaaagaagaaacgggcagaactgatcgtccggaaactggaagagatggaaaagatgagcaaagctaccgacaagaaaatacagaaaagatatcagcgtatgttgatgaatctgattacttctaccgccgacaggtatatatacgactgtttctgccgcttcggagcggaatttgtacgggaagccgattataatgagaataaattgcggacggcactaaatgtgagtagcgagcatacgattaagaagtccgggcaaatgcggacatatatccaacgtgcttttcctgtgggtgctgaaatatccgtgcaggaagcgaaaagtatgctcagacaggtatataaaaaaatgggattaaacacgggacggggcataacgacgaaagaactggaacaatatgcggaggtggaaaagggatggaaacatgacagcagaacaatcaaagttctgaaattcaaataattaaaagaaaaatgcagttttctcaatagaaaagtcaaaatctactataagatttctgtaaacttctcttatttcaagggaattattgctaataaatcattgactatcagcactgccacatttttgtcttcccccgtataatacttatgagagatacaaaaatgtggcagttagcgtaatacactacatcaatatgtaaacccaaacagccacaacggtattttattcccaaagcctgtttctataccgtccattgcaataaagctattttccagatttttaatctgggcaaaggttttatttctaccacccacctcgaatgtatatttatcgtcaatgacaaaatcgccttgcttgcttgcggttactttgtgagtgacagagcactggttggcaaagaacgtttcccgtgcattaccttcattcacattggacacagccaacgcatagatgagattcgtattatccaaatatattttttccggtttgttcatcagactcatcccacttccggaagaaagtagcatcttaattagtccggctttttgcaaataaccaagatatttgatagcagatacgcgattagtctctatttcagcactgagagaagttaaattcggagaaaacgggactagtgaagaaataatcatcaacatcttttttatcttaataatagtctgatattccacattttccactgatggaagatcattgtcgagaatcgtatttaccacattctgcaaacgcatcccataagactttattccttctttataaaacggataataaccatactcaaaatatttcttaagcatgggaagtacctttatctttgttgtgacaggcgacacaagattcatgtgattagtaagaatctcatctaaagttaatacaggaaaatctaatccggtttcaaaatttagaaattctctgaaagagagtccgtataaatgataactgatagccctccttgacaaatcggcattcgatttatatatttcaagaatagacgaacccgtaaatacaatatgcaaggcaggataactatcatatatatttttaatttcaattgaccaattaggataacgatgaacctcatcaatgaataaatgagttccgccaaaagcataaaactcatctgccaattctaacagactgtttttggtaaaccaaatattatctaaactcacataaagtgcttttctgcgatctgcaaaagtagctttaatatgctgcaatatcatggtggttttaccggtaccacgagaacccgttatgccgattaaccgattgtcccagtctatctcattgtatagataacgataatgcgtactatcagtagcatctagtaaccgcgtataattctgaaaaagtgcctcttccatatctttctagtcttttgttgatacaaagatataaaattgtaccatagaaggtacgtttttgactaaaaatcgttcctcctatggtacaatttagtatttgtaagtagcctatctcatacagcattatgaatactttttcaaacgcctgcgtgcaaagagagccaaaacaagcacaacgcacaaccccgctccccatatccataacagtaaatctcccccttcggtctttccataagagtgcaagccgctcaggtagtagtttactccaaaccaagtcatgataatggagagaatggagactacggacagcaaattgtaacaccaggttgttttacctttcagcagcgggataaaacggatatgaagtaccagtgcatagacaacaatagagattaaagcccatgtttctttcgggtcccatccccagtatctgccccatgagacatttgcccagatggcaccgaggaaagttcctgccgtcataaagaataagccgagaatcattgccatttcattcagtaaggtaaactcacggatacggaaaaggagtttcacccgattggtggcagaaagcagattcatcaagataagattaaacagtcccgtcagcgcacaaagtgcgaagaatacatagccgatcatgataatggcgacatgagacatcagccaatacgactgaagcaccggaaccaaaggagttatttccggattcagatggttcagtcctgccacgaaaagcatgattccgcctaacagtccggcaagcgcagggagaatacggaactggcgggcaaacaagaggcctccgccaacgagcagccaggaagtgcaaatcattgattcgtaagcattcgcccacggtgcacgttcggagatataccagcgcagtaagacaccggtcgtgtgcgcaaggaaagcagcgatcagaagaacaatcagtatgctactcagtttgctcccccatttgaaatccgcgataatctctccgcaggctatgaaaagtaagattccgcccaaaatcaggtaagccagacgacaccagaagaacaggtttaactgattatagagaagttccgcttttactctctgattgtcaatagcgggagttttactttttgcctgctggaagatatgcatcatatcgacaatcttgtccgcttctttccagttatcagtacggaccccattgcccaattcgtagatataccaatccatgattttagaaacaaacagggaatccttatcatgaaagacggtttgttcgtcacctgccgagtaccattttccctgaacgtcgttttcgtccgggaagaggggcagaagttgatactgcataatacgatagacaatattcaccgattcatccagttttaacaaatccgaatccattcgtttccgttctgaagcggattttgcatagatggcattcacttcatcggtcagcacatagttgccgtcggcatcaaagacatcctgccatgcgatgtatttgccgtctcttccgaaccgttgaagaatttctttattatcgaccttgataaaaggatagccaccccactcatccggaaaagcgagaagattcagaaagaactggtctgaattgatgctgttcagcttgtccgctccgtaaagtttgcgtagaatggcggaagtgtaactgttgacaggttcaaggcgaccattaggattgagcagtaccagactgccgaatttccgggcgtgcggggcaggaatgcaaggtagctgcgaagaagaaagcgtttcctgcgcatatgacgcctgtgtgcccaaagcaccggatagacctaaaaagagaagcagacagaaaggagcattctttttcatctcccccagttccctgcgcaaacgaccgaaacgggacttcttactgaacagagtcagcacaaagccggcgaacagcaggaaatagccgatataggtaatctgcataccgggacggtcataacttacggacaacaccgtgccctgctcatccggatcgaacgaagactgaaacaaacgataaccatccacttcaatcaccttattcatccggaccgtagcctgcaaaggagcttcattctccttctttatcaccagatcgctttcataagacatcggactgtgcgaacccggataacgctttaaccggaaatcatcgagagtgacagaaaaaggcagggaggcatttcccatccctgccccttcatcgcgcatcatgcggtccaccgtttccccctcacggatgtgcatgattcctgttactcctgcatagtgagtaacagccgcccccaaccaaataaaaaccaaagccccatgaaagatcagacttcctttactgattcttttgaaataacctccctgaagaaacatggccaacagattgacagcctgcaagagttgcaacaaaataaaccacggagcataataaaagtattcgcgcgcaagggccggaccggacgaattttccacaaaagtggcgattgccagtaccagcgcataaactcccgctaatacgtacatcaaaatcggagaagcgatcaatcgaatcagtttcatcagttttctgtttttacaaataagcaataccttctatttctacaagcagttcttccctgcatacatcggcataaagatagacaataggaacatcgggacaaagtttgtccatatcttcttttacaatcttcgcatcctcttcatgcttcagatacacacggagaagttccagcttgccggaatgttccggaagtttctctctcccttcttccagaccaatcagatgctggatattctccagtgtgatttccgtctgcacaagcacgtcgcccgtcacgatactttcttcaccacgaatggcggctgtgccggatatataaatcatctcctgttgatgatcggacaacgatttgcctctttcaaacttgggagttcccttctccgcatccgtccggtggctgatcaggacttcatccgaatagacatgggcagctctctgccagtcattatccaacgggataatctctattcctcctttgacggcattgaaatcgaccagtattccaccatgttgtgtcccgattcctgtggccgccggatatccggaagcccattccgaagaagcataaaactgcgaacgtatatcattaaaatcctgataacactgattgccgtacacaatatccgtgatgcgttccagataattccactggcggacaatatcaccgaagctcatctgctccgctttcagcatttcttccgctttcccgaacacctgctccgactgttcacggacaggaagagtcaaatcgtcggcatagagtcctcccgctattatttcccgataatgaccggaggtaacccgaaggtagcggacggaagaagtcatctgttcttctaccgtcacttcctcaccggcagttgccggcaacgaatggacttccatgaccagttctcccaccaaaggcttttgggctacgagcgaaaggaccggacggggagaaacgaaatgatcgtccacccattgttccagaaaagaccgttggagttgatattcccgattatcctcacagaatgtaaagaatacaagacggaccacttttcccccatgttcctttcctcccccgcgaacggctgacaaaagtaattcttccgccattcgttcccagctctttccttccgctttatagatttcacattttatccgataatatttcatattgcaaacttcaatgattttttatgccacagacatcaattaatgatacgaagctactcccgccggcttgtctgtgctatatacggaagacatcgtctgtagttccggagtattttccagagagtagagcacattcttctggcggtctaccagcagcagatgtactttctccttcggattcacatgtcccgtccagttcgtaatcaggaaacgtccgtcggagaagtactgaaaacctccgagaaacttcaaaggctttccgggaatatccgcattcgatatttcccagatcgtttttccttccggagtcacttctatcaatctcgggttctgatctttatcggcaacagctatcagcgtatgtccgttaggcagacgagtcagagaatgaggaccgccgggaacatccagcttccacaccaccttgccgtttgcatcatactccttcacacactggtctccataatgagctacgaggaaatgaccgttatccagccgccgtgcattacgcatgaatgcgaatccgccatccttcacacctttcggcaggatgcaggtttccttcacaatcttcccttttggggatatctccagcatccgtccggtaacacattcgccaacgaaagtattaccatttttcaggcgttggcaggcaaagaccggactctttgattcataatggaaaatggtatcgttctgacgagtcatttcgagcactccatgtccggtggtgaagaggatattgccgttaggcaatatccacaaatcattggaatcgggcgctttgtgcttccacaccatttggttgttttccatcacaaatacgattccctgcgaataatcggctccggcaaacgtcttggtctgtgcaaacagagaagaggcagagagcagaagcgacaaaaacgcaacactacatatctttatcattattattctatgtattaatataaacagatatcttctttacaaagacaacacatactcttccagttcttccaattccttctcagtgacaggcttatgaggtccgtgaactttcagcatatccttcatcgaatagctgcgcccgtcataaagatagggagctgtacgccagcattcattcagtgccggaacatccatagacagtcccttgtccgggcccgttgtccagtctaccttatactgtttctgatctgtatagtactctccggaatggcagctcgcacagttttcttcaaaaatcttctttcccttctttgccttaccggaaagtttaccgttcacaaggtatgggcttggcaacggtttcagggatttcagatattcgtcgatggattcgtatatttcgtcttcaccttccataaacagaatatacttcacacccgaacgtaccgctacttcggcattcttacggataccggtcgccatacaaggcggagtctgatgcgaaagcaagagtgtcttggtattcttcggatttcccataccgtcattcagcaagtcccagttaagtccgtccatgcgggcgtcattcggatgacaggtagcacagctctgccagttctggaaacaaatagtagcgtcatggaaatacatatcaccctttccgactttcgtgaaagccagcggagcacccaaaacctgcttcttcagattcttgccgttcaaatccatagacaccaattccgaagtataatagttggcagtgtaaatcttatctccggtagcgaccaccgaacgggggcctttcccctgtgtcgggataaagtcgcggataccatataagaatcccgcatcattcggaatattattccatgacttcacggaaggcgtcaccatctctccctgctttgccttcgccagacgttcgtgcaaagcaatgcggtcaatacgaaccaactcctgacttccggcagcagctacgataatctgtttatcatccggagtgacaatcaccgaccacggattggcggctcccttctgaggagtatccaacaatacggaagtcagcagtttcctcgccttcagatcgatgatggacagcgtgttcgtagccatccatccacggtccagctgattggtaggcaactgataacgggcaatcaagtgagtgacatacgcatacgtctgatttttatctaccgctacagacttcgcatcggtagcgccattcggcaacataatgcgtcctgtcaccttctttgaagggacatctacgatatcgagctgtactgcaataggataagccgtagaaggcatttccggcagattattggctatcagcaggcaagagtctcctgcaaacggagccatagccaccggttcacgaccgatcgcaatctttgtctttaccttacgggttgccggatcaatttcccacaactcgttgttgaagcgttgtgtcacccaaagtgatttggacaccggactgtacaagatatccgaaggcgtagcaccgctctttgtttttgactgcaccgaaagtttctttccatccagttcgtacatcatgccggtgtttccgtcgcataccacccaaaggttgccggacgggtcttgtgtcatggcgttgacgggcgaagaaagggtcactttctgttccgctttctgtccgtcggacgagatttttattagttcattgcctgccctgttcgttacaaacaaggactttccactgtccgccagaaacaaacgatccggcgaaaccgtctttgcatcttctttccaactagcgcaaagaagtatagctacgatactaacaggtatcaatatctttttcattatttctgttgtttagtttgaagagattgaatgtactggcgaatattctcctgttcctccatgcgggcttgtttccgctttttatcgtagcggtcgtaaaactcccggtcatgatccgaccagttgttcgcttcccggtagtcaccgatctgaggaacaagcaagtcgatccagagagaaactttacgtatctcctgcggtgtcagtttcgtacctccatgaccctcttccagacgcttgatcagattactcttgttggaccctgcaaaataaggaggcaacaaagtaggttgggacaaagcgctgatccagtttacttcaggatgatgggcatcgcctctccatgctctgtcgggaccatccggacgggcatgcgtcagactgagatatgagtccgtatattttcttttactctgtttgtccactaccttcagttctcctttcaggctcatcgggtgttttactccgtcatgacaagagatacaatttcggtcccagataggctgaatctctttcagatagctgaagttacgttctcccatttcatcttccggagccaatgccttgattcctttgtccattgccatagatacccgatgacctgccaccggaaccgtattcttgtgttcatggcatcctacacaactctgaacttcgttcggctgcaaggtagaccagctacgcatcgtctgcactaccctgcccttttcgtccaacgcctggaagtaaagcggtctgcgggcaggtactttaaagaaagcggaaccgtcgggatatacatccgtcactccgatcactctcttcacgtcccaagcggcattgccgactcctaccggagaacttgccaatgcaccacctccctcatcattaccattcacttcgcctacaccagctgcacggaattgaatttctacgatacgaagctgtttgatcgttccgggagctactcctttcaaaccgttcccttcatagatattctgcatataatatactccttcattcttcgtatagtctacagaagacgaacgatggaacggacgtttacggggagcaagcaagatgggctgattgcaggatatcttcgaatcggcaaccagtaattcgcgttctccgtttgcattcatccagtaaatgccgaactccatcggatgtccgatgtggtatcccagcggagtataggaaatcagaaactccgtctcgttcagcgggaaaggatgctgaaactggtcggtaaactgtccgtagctatctatacgctctgcctcgggtttgcgcaccggagcaacaaacatgacaccttcattctcatctcttccggcttcgggatcaataatacccaatttaccgtgctggggattatgatgtcccatgaaaacagtcatcactttacgtgtaccgggaatctgacgggtatgcgctaccgttgtcgggaaccagctattcattccgtaatattcagcctgtcccgttccgtcaggattcatctggaacaggggttgcgcccatacttgtccgcggtcattgtaatcccaacgagtgtaaactacccgaccgtcatcaagcaaagtcggcgtagtagtatgcacctggtcgaaacctacctgacgcatataacgtccttcacggtcgcagaggtacatattgctgacttcggtaaaccagcaatccaccgcacttccgctacgggtagagttgaaaagtatattctcatccggcaggtagatgccttcgatatcggcgtgtccttttccgaaagtcagttgcttgaccgcacgtgtctttaaatccatctcatacaaatggaaatcatcgtcttttgcagacttcttccaagagaaaagcaggtgctgaccgtcaaaatgaagattcgggtcacgatatacaccgtcttcgtccgtcagcagtgtttcttcctccgcccagataccgttcatcttaatcttcgacagcgaaccgcctgcaaagtagttgcactcggcacgggcatcggaaacgccttcggtataagcaaagaaagaaggacgcaacgttctgaacttcgtaaaaacaatctccggctgattggcagtgaaagtttccagacgttcggcacgtcttctctcgcacgctttcagataagactggaaagccgcttcgatactttccggagtatcattgacagcagcagtaatattcagtttctgcatacgaagggaaagctgccggctgaaagaacctctgaaccagtttacatctttcccgtcctttatgtctttcgcatcatttccatcctgtagccaccagtcataataaaccggataatcatgcatcaacatccggtgtgtatctcttactttacgttccagctcttccctgtgattctctttcttctttatcgtctgaacctccgcaaactgcttctgcatttcggcgataaaaccttttgtgtcggttggctggaaagaagtgtccttcgcctgccaagcgaggaatgggacgagcatgcaacatgccagcccccacttcaaccattttattaatttcgatcttatcatttcaaattcctgtttaccttaaatttacctttccgaaccggatattacagacctttcttcaactctttgtaagcttctacaatctgaataccgcttgaagtaccgatgcgggtagcacccacctgaatcaatgccagtgccgtatcgaggtcgcggataccgcccgcagctttcacaccgatcaccggacctaccacacgacgcatcaattcaacatcatgcacgttggcgcctgccgtaccgaatccggtagaagtttttacgaagtccacacccgcttcctttgcaatgcggcatacggtttctttctcttcgtcagtcaggtagcaggtttcaagaatcactttacagatcacaccggcaggtttgcagatagaaaccatatcttcgatttctttctttacaatgtctgtctgtcccttctgcaaagcacggacattgatgaccgtatcaatttcggtagctcctttggcaatggcatcgcgggtttcgaatgccttgcactctacggtattctgtcccagagggaaaccgatggccgctcctacacgtacacccgaaccttccagcagtttgacacaggtttccacttccgcagggttgatggctaccatcgcaaacttatactgacgggcttctgcacagagtttttcgatgttctccgctgttccgaaaggtttcagaaaggtatggtcaatcattcctgccagttgttctactgataaattcgcaatcacttcgtttatatttttcttttccattgttttgagtcgtttaatatgttagtttattgttagttcttaaaaagtcaatacacatttcaatacttcaccccgtttcacggcagcgaaggcttcttcgatttcttcgattttgaaacggtgcgtgatgaagtcggaagcggaaagtgtgccttcttcaatccattgtgccagcgtggtcatagccgctttctcttccgaacgggtaggccactggtgcatatgcaggtcgaagttgtaaggcgctttcgacaaatcgaatgtcggattcttcgtcatgacaccatatacacagacatcaccgcccatttttaccaacggcaatacggaattgactactacatcgagtcccacggcatcaatcacggcatcgtaagaacgattggcggaggctataaactccggcgtgctgatttcggcaggcgtatatccgttgtccgctcccatccggcgggctacttccagtttggcgggaagcatatcgacgatgtcaatctgccccaagccgaacagcttgcccaacttgacgaagctcagtcctacaggacctgagcctaccactatcactttctttcccggagtcaggttgaaatccttgaaagcgcccagcacttcacgccaggtgcaggagatcaccgcttcttccggctgcacatgagcaggaaccgagttctgaatctcaaagctgtcccagcatccctgttcgggggtagccagtccttcttctttcagtacctcgaaatcgttcaccactacatattcgctgaaaccgccccagccgctgttaattccctgcgcggcgccaaagtcggagatcagaccgccgatagcacggtcgcctactttaaagttgcgcaccttctcgcctacagccactacaattcctgcattctcgtgtcccagagccagaggataagtatctactccgggaaaatgtcccgcaatcagcttgctgtcggtcgcattacacagtgccaccatttctgttttcaccaacgcctgataagcattgatgacaggagtttcgacctctcgtatttctattttgccgggagccggcacaattacagatttcatcgtattcttattcatttttataggttatagttcagtttttgctatctctgtgtacatctcacacaaggcgtgataagcctgatcgaaaacaggcatccacgcttcgtacttcttcacgttttcgggaataggctgcaccgtctgctcgatacggacaaagcggtcgattacagagaaatcagggaaaacacccgcaccgatacccgcaaggatggccgctcccatcgaagttgcctcttcgagatagttaggcacacggatctccgcctgataaatgtccgccatcatctgacgccagacaggattctgggcacagccgccgatcaccgtcatgcggtcgataggaacatgcttgcggaatatattgatgataaatccgagattcaaggttattccttccatcacggcacgcaacatatcaccatgcttgtgtcccagcgtcagaccgatgaaagcccctttggcatcaacgttccagcggggagtacgttcacctagcatatagggaaggaacaggagtttgttcgcacctatcggagaagcaatgatctgctcgtcgatcagttcgaacacgctgcgtcccgattgagctgccagtgcctgttcattctggcaaagttggttgatcatccagttgtaagatgatcctgccgcctgcatcgttcccgacgggtgcagcataccgggcactacatgcgcccagttcatggtacggcgttgttcgtctacaatcggcttttcgaccgtcagtgctacccaggaagaagagcccagataattgtacgcagtgcccggagccacacagccgacacctactccggcacagctaccatcgccgccgccacagatgacgggtgttccggcaagcagtcctgtctcacgggcagcttcgttggtgatttctccgatcacgtcaatcgacgaacggacttcggggaataaagaaagatcgagctctgcggcttctatgatctcttcactccattgccagcggttcaaatcgtaggcattggttcccgatgcatccgaagggtctgtggcgatagtaccgcacaaacggtagttgatgtaatctttcgcattcagcattttggcagtctgcgcaaagatttccggttcgtgcttctttacccacatcagtttctccacagagtaagaggcgctgatccgatgtcccgtgatttcgtagaaatggagcgggtctatcttttcggtcaactttgcttcttcttcctgcgaacgctggtcgcaatagagcatatgcggacgaagcggattaccgtctttatctacgcaaagacatcccatcatttgtccgctaagagctactccggcaatatcattgggtgataccagttcgagaagtgcctgtgttgtgtcaacgatggctttccaccaatggtgcggattctgttccgcccggttgccggaagcatagtcggtaggataagcagcggtacgcgaagctatcaacagccccgattcatcgaacaaagtggctttgttcccgctggtacccaagtcatgtgctaatatatacattttatattttccttttcagttaattgaattagagtgccgcattcgtgtatccggtaaggccgacgaagattcctccgacaatgccgcccagtataataactacccaacgtggaaacgcttctttcagcaatccgccgcgtgtgcctttcggtgcgcagagcacgtctgcaaagatgaatcccatcgcaatcgcccatcccatgtctacccagggggcactgccgcgattcccctgatggatcaggctgaactgcatcggcaagccgtcggcatcgttcagcaatccggtagagaagccgaatccgggcagtttatgattgaccagccagaacgttccgatgataagggcggcggccatgaatccgcctatcggaccgaagtccttcaccagcttgggccagctcatcaatacggtaaatgtcacggcaaaagctccgaaaatagtagtgatgattccggcatgatacataccgaacatctcattataggtttgtaaccattcgctcattgtgttctcctccttattttatctttcgggcacagtcgcacgaacggattttccaaactacaattcccgccagtgcaccgcctatcagacaacagaccagtgtaggtactgcataaaagaaattggtaatgtctccctgaaagcggacgattccccaggctataccggcagaaccgatacaccagccctgatcgagccatatttttcccggaggattcaaaatcgctccgttataatgattcatataccacatgatgccgataatcagcgttgccgccagccagccgcccatcagaccgtaagtcttccagagttccggccagatgccgaaagcgaaaccaccacagatggcggagccggcaaaggtcgatagatagtatttcatattatagatatagataatgtgttcttgggttaataatatttttttaggcacggattacacggatttcacggttaaagattacacagttttattaaatccgtgtcatccgcgtaatccgtgcctaaatcctattttttctcttccaatgatagtttagccagtgtgaaaggcttgtcatgcttggtatttaccttgtccggtccggtcaccaagtcgaaacaggatacaatcacctgaccgttccatacgataggttcgcccggttggtccagtccaccatcgcttccgtcgcaatcggggctttgagcgatacgctgaatctttccgtccttatctacacgggcaacggcatttgcagagaaatctgctacccagatattgcctttatcatcgatgcacataccgtctgtggtacgaagctgagtcgtatcctgtgcccagacatcgttgctgacaacttttccttccgcgtccatcttgatacgatggatagcgccgtcaccgaagttacccacaaaaaggtcacccgcttcgttaaacacgattccatccagtccgtattgcacttcggggttcttggtgattaccgtagtcaacagattctgatctgccgaagtattggttactgcgatgtcacggtcgttcatatcaaaacaatatacaccgctgacaagcagaccggaagggtctttgatctgtgacaaagagctttgagtcacatataattttccgttacggatacggataccattgggatgctccatgccggatgccaccgtaatagtttccttcaactggtcattttcaaacttcagacgaagtacacgacctttgttctttgctttctctgcaccactccagccctgattgtcactgataaacagatcgccctcttcattgaaggcaagtcccatcggagaagcccatccggtttcttccaatacaggcacatccagccattttgaaacggctccatccttagtaatacgcatcaggcaagcaggctgtgtgatatctgcaaaattgggacatgccagaatcaaatctccattgggagcaatggccatgccatccggtgtcggacaatagtccggcaatgatacaaacagttcactcttttgcggaagagtattctctccactcttttgtttgggagaagtacattgaatacaagttgctccaatcaaagaagcggaaatcagagatagtaaataatactttttcatggttagctgatacaaatgtttatgtttataatttgagtccgttagttcggtacgcaaacttactggaaaatctcagcaaagaaggaaaacgacaaatcaataaaggacaaaatttgttcattatgacgcaaaaatgccccttttttcattaaaaaaggatataatccttcaacagaatgattcatttcatctctcgattatccatcgacagggaactcaacaataatagaaattacactattttatgaacgaatcaaatgatcaaaaccactaaaaagaagagtttatttagaaagcaccttcggtccgaatggagagatttaccggctagaatctgccgaaaaaaagagaatatgaagtcatgcgattaatgaaacaatccggctgaaaatacaaagcggcgctttgtgtgagctaaagcttagctttaggagtcgtaaagctaagctttagcctccccaaagcgctatgttattaaccgatgcaaaaatgcactttttcgggggcctccctaacacacgcacacacgtaagcgcacgcgcatacacatacacacacgaacataactaaatacgcgtaaactatattatatacgcgcgcctgtgtgtggaaaaattgtggagtgcattttctgcatttttgcatttttcacctccgacaagctgttcataaagaaaagatttatacgcatactcttccataattcatcccctttgcccacgtattccgctattttaaggctaaaaagcacattttctcccgaaaagtttttgtaatatcagagttaatcgtatttttgtgtacaattttggtgtagtgatgacagaagaagaaaaaaagttattgagtacctttgaaacgcagctacggcatttaatgtatttgcacgatgaattaaagcgtgaaaatgccgggttgagaaaacttcttgaaaacgaaaagttgaagaacgagaaggtgcaagctcagtatgatgaattggaagtcaactatacaaacctaaaaacagctacggcaatcagccttaacggcagcgacgtaaaagagacgaagctgcgattgtcaaaattagtgcgtgaagtcgataaatgcatcgctttattgaacgagtaaagaagaaagatgtatgaacgataagataaagataaacctgcaaatagcagactcaaactacccgttaaccattaaccgagaggaagaagaaatggtacgggaagcagccaagcaggtaaacatcaggcttaatgcgtaccgggaatactataaaaaccttgaaccggaaaagattattgccatggtagcctatcagttctcgttggagaaactgcaattaatgcaacgtaacgataccactccgtatacggaaaaggtaaaagaactaacggaattgctggaggattattttaagaaagaataatgccaccgagccattcactgataaagaaaacaccacgcactgcacaatatccgagcaaatgtatgctctgatatttggcggtgcgtttttatttatataactaaattaatgtaagaatgatagcaataatagcaacagcaattgcttgcttcgtcgtaggaggaatcctttcatacgtactgttccggtacgtattgaagtccaagtacgacagtgtcctgaaagatgcggagacagaagctgaagtaattaagaaaaacaaattgctggaagtaaaggaaaaattcctaaacaagaaagctgatttggagaaggaagtggcactgcgtaatcaaaagattcagcaggcggaaaataaactgaaacaacgcgaaatggtgctcagccagcgtcaggaagaaatccaacgcaaaaagctggaagccgaagccgtaaaggaaaacctggaggcacaacttgttatcgttgacaaaaagaaggaagaactggacaaactgcaacatcaggaaatagagaaactggaagcaatctccggtctgtctgccgacgaagcaaaagaacgtctggtcgaatcactgaaggaagaagctaaaacgcaggcacagtcattcatcaatgacatcatggatgatgccaaactgactgccagcaaagaagctaaacggatcgttatccagtctatccaacgggtagctaccgaaactgccatcgaaaactccgtaacggtattccatatcgaatcggacgaaatcaaaggacgtatcatcggacgtgaaggacgcaatatccgtgcactggaagccgctaccggcgttgaaatcgttgtagacgacactccggaagcaatcgttctttccgcttttgacccggttcgccgtgaaattgcccgtctggctcttcaccaactggtgacagacggacgtatccatccggcacgtatcgaggaagtggtgtccaaagtacgcaaacaggtagaggaagaaattatcgaaaccggtaaacggacaacaatcgaccttggtatccacggtctgcatccggaactgatccgtatcatcggtaagatgaaatatcgctcttcttatggtcagaacttgttgcagcacgcccgcgaaacagccaatctctgtgctgtgatggcatcggaactggggctgaacccgaagaaggcaaaacgtgcaggtttgctgcatgatatcggtaaagtgcccgatgaagaaccggaattgccgcacgcattgctgggtatgaaacttgccgagaaatacaaagaaaaaccggatatctgcaatgctatcggtgctcaccacgacgaaacggaaatgaccagtctgctggctcctatcgtacaggtttgtgatgctatctccggtgcacgtccgggcgcacgccgcgaaatcgtagaggcttacatcaaacgtctgaacgatcttgaacaattggctatggcttatccaggtgtgaccaagacatacgctattcaggcaggacgcgaactccgcgtgatcgtaggtgccgataagatcgatgacaagcagactgaaagcttgtccggtgaaatcgccaagaagattcaggacgagatgacttatccgggacaggtgaagattaccgttatccgtgaaacacgtgcggtcagcttcgctaaataagtaaatattcaaaagaagattcaatacaagggcgaagcaattcgccctttttcaatttatcatcattcacttctcatgtttgcagcattacgtagcagcatgcagtctaaaagcatcagcttatgaaaaagtaccagtttgaagtctgtgccaattccgtagaaagcagtctggcagcacaggcaggcggagccgaccgggtagagttatgtgcaggtattccggaaggcgggacgactccttcttacggagagatatcgacagcacgcgacatgctgacaacgactcgtctgcatgtaattatccgcccgcggggtggggattttctttattctcccatcgaagtgagaacgatgctgaaagatatagaaatggcacggcagttgggagctgacggagtggtattcggttgtctgacggcaaatggggaaatcgaccttcctgtaatgcaagagttaatgaaagcctcacaagggttatcagtgacttttcaccgtgcttttgatgtatgtcatgatcctgaaaaggctttggagcagattatcgaattagggtgtaaccgtatccttacttccggtcagcaagctaccgccgaactaggaatccccttgctaaaagcattgcagacacaagcttccggaagaattatcctgcttgccggatgtggcgtgaacgaaaagaatatcgcccgcattgcttcggaaaccggaatacaggagtttcatttctccgcacgggaaagcatcaagagcgatatgaagtataaaaacgaatcagtatcgatgggcggcactgtacatatcgacgaatacgaacgaaatgtaaccaccgcccaaagagtgataaataccattcaggctataaaaagctgaaaactgcgataaacagcgatttatagtcctgcaatagcatacctgtttataaataagggataatcgtaatataaataccggtaataatagccgaggtgattactcctgaaatattggctcccaaggcatctcccaatacgaatgaattgggattgtctttgcttactatcttttgggcaacctttgcggtggtaggtacgcaactaacggctgcgataccgatcaccggattgtaatttccccgtttgacaatgtacatgatgtatcctccgataatccctccgataccggaaagtaaaagtgcaacgatacctaataccagcaatttcagaatcttcggatcgagcaacagatgtgcatcgcaaagtacgcccagcaacactcccaacataaaggtcgagccatagagcaacggaccactgacaaaatcataaatatgcttcataccggattcacgaacagcaacacccaggaacagggagaagaacaatggagaggcaaccggaaacaagaaacaaagtactgcgcagagaacagcagagaaagccagtttcactttggcatcgtaattcttcggcgccttcttagtcaccatcttaatggcacggaaacgtttgggcactaatagcttgaccagatatggataccctccgtacgtcagtcccaaatacaggtaagcgactaccgtgataggaacaaacaaatgttttgccagagccagcgaagtaaagagcaccatcggaccgtccgcaccacctaccatagcaacagatgcgctttcctttaaagtcagtccgagtgcggaagcgatgggcacggtaaggaacgtaccgagttcggcacataaagcaaggaatatactcgcaaacggtttctggagcaggaagcccacatccagcaaagttccgatgcccataaagacaaagcaggctataagcccgttactgaaagtcagcgtatagacaggttgcagaaagtcgatctgcatcgtattcatcaggtcatccgtatccgaaagcatcggatcgaggaagaggttacccaacgtaccgtccggcatcatcaatgttccgcagttgatggctaccatgcccagtcccatcggaatcataaccataggttcgagcactcccttccaacccagatagataagtaacaaaccgagaagtaccagaaagactctggcagaagccagtaaccagccgctttccatcattgtgccgataccctgaaagagggtggcaaaatcaatattttccataaataaacgtcattttattgtttgttggtagtagatttctttgtatttttcttgttgacatgcgccagttcttcttctttgagaaagaactcacgtgtatcccgcggataataataatccatcaggttctcttccgacgcacccggacttactccatgataataaccggaatagctggaaacattccggttgattccacggctgaaatcttcgcgataatctcctaaggtcccttcgtccggaagaggcatctgtctgacaagcctttctactttctgcctgtgttgtcgccagcgatgtaaccgcagcagttccagacggtgagaactataaaaatcaaaagaatctgccgcataagcaatcagtttgatgactgccgcaacaaaaaaaccgatgagaaaggtgagccccatcatagcgaaagtagatattaataaatcaatcatagcaataaaaaatataggttttataatatagtattcaaaaaaaagaagaggcgcccaatggtaaatcattattaaaatttagacacacatgaaagttaaatcccattgggcactcctcatcacccatatagaaacaatcggcagatgttatttgcttgaatcacttcggtatacatctttgcttctatacgacgtaactcccgtttcacaacgaaaacacaatatcctgatcccgatacttgattgggtatccgggaaatatatcacacgtttataggaacaataaataaaaggaggggcagagagaaaggacatacctcaccctgccaatggaaaataatgcagcctaaataagaatatgggctaatgtatagacgtagtatttacacgaatatttagtgtaattgacatcaaaacaggtatggctcagacgttcctccggaagcaacgtattcagtgagctcaatatctgtattattgcagtatttgtattaaatctcagattcttgaaaggaacaatgcttctcggaaaagagaggttatcaaaaatgcagtcactgaccttactgccgtaagttccgtcagtcagcaatgaatgagtatctttacatgatttatcgaaaccggcagaagagacactgcaatttgctcccgcattgtattgcatatcaattgccgggacctcagtttctttctgaaatccctgcaattctttattggaaatatgagtaaatcccaaagccagaaatgcgcatgctaatatgcaaaaaatgtactttgccataatttgctgcaaacgtaatcattcttttccaataacaatgtattaatggtaagaattaacgattattgcactctggctcctctttataatccatgtactactttcatcaattgctctcccaggccgatcgtatatccttgagaaacaaagaccacacggttgaaggtatcggcaatgatgaagacaggcagggttgattgattcaacttcatcgcatcaacaatctgtttttgaatgctgttatccacatcaatgccataaacaatggtagagggaagatctttaaattcatgcgtgttgaactttttatattgctcttccgaagggaaaagaaagaccattttacgtccccactgttcaaactcgctgcgcaaagccgcaatatctcttaaagcatgattggtaggctcctgccccactccgagaacagcaaccacaaaatagcctcgtccgcaggtttgcaggatactttgcaggtcagtacctccaaccggacgataggtagcttcggaattgaaattaccgatcacttgtacctgatctttactttcacgcatcacaagatcaacagtagtcgtcttatccggttcgatagtgaagaatgtggtattggagagtaccgcaccactagccaggcgggttccggtcaccatcatataataaccttcgtccagctttactccgtttttcaggagattcgaccacgtagcaccaccacccatatctacatcgccttcgtcataattgagcagttggaacgtgccgttcttaaacttggagatagtgaaatgagaatagtatttaggatcggataaagaacgtatcggagtatagctggctttcaacatgccggtacgaggttgcgtggactgcgaagtctcaaagttgacatcctgcggagaaagcccatcacttgcatactgaaccttcccagtcacttcatcaatccaggctggtatccctatgctccgggcagctgctacaaagaagatatcacgggacttctcatcagctacacgtgacttccatactcccatcggagaaacaggaatccgctgagaattcagttcgttatcaatcttgatctcttttctgcaccattctattaatgctttagcatcatgagcggcatcaacaggtgccgatttcaagactgcttcagaaattgcatcataaagtacctttttataaggagtcagcatctcattcgctatgcgaggattgagcaacgcccttttcaccaaatcagcgtccgttttttctccatccgatgtgtttttcagatgatcgttcagtacatcgagtgtcacgtcacgaagatcttttgccgagatattctctaataaccacataccccgcatttcctcccatgaaatatgttttttctcctttctgatagctgaaagaaaatccttcaatgtctgatggtttccgcgcgaagcaaccagaaaagctgccaacttatctttcatagtttcaggttgcaatatattcccgtacagtccgttcacccattcttttgcctgttcatctgtcatcatcgttgccacatatgcattgcggatcgaatcttcctgtgctatccggtggtcattttccgcccgttgttcaggagttacttcgggaaggttagccccttctaccggaggaacaatatccatcggaagtgtatagctttcaccttctttcttatctaaagataacttcaaagcatcttcttttccaaatgacagtttagcatatccgaattttccatccctggatgcccataccaacatatctcccttgccggcagtgaggaaggctttaccttcggcatcggtatatttcgtggctaccgtatagaactcagcataattgtatatcttaaattccacttttgcacctgataccggatgtccttccgtatccgtcaccgtcactgtagctttggcagtaggcgcataattgtctatcacattgatctccgtgtaattcggcgtttcaagcataatctcttccggaccggtatagcgaccgaacacctttgtatgcatcagcatcccgcgactggcaggagcattaaaccatccgagattcaaaaccggttccggctcgcaagctccgaagaaataccactggccatccgcccacgcttctacccaggcatgattatcatccgtatgcgcccaacggggagtatatacctgccttgccggaatccccaccgaacgcaacgcagccacagtaaatgtggattcttctccacaacgtccataggctgtcttcaccgatgccaacggcgaactggtacgtgcatcacttggacgatagactaccttttcatggcaccaatgatttacttccagaatagcgtctttcatggacagatgcttcaccctatccttcaattctccataaaacacccgacgcgagtcatccagattctcattattcacccggataggcaacacaaaatgccggaacaattcatccggaatctgatccccccaaggcatctcggtacgcgtctgcccggacaagcgaacattctccaaataataatctcccgaataatccgtcacatcccctatcggcatgtaagcatagagaaacatcagggcttcctgctcatatacagacaagtcaggattcgaaaaaacagtaaacaggtctccatgaggaagtgcttgttttttctgttcaaagtcttcggtcacttgattccgataattctcttctttcagaaaatgagcgttgttgcaggcaaatagcacaacagacaggataagaacggataaaagatgaatgaatgtcttcataaaagtgtttggtttatttttagataataagattgctgattcacaaaaatacaagaatattttctgaatgcctagataagtatataaaaatgtgacagataagaataagattgtcatcaaggaaagaggacgggaaaattgtaacaggtttgtaacatctccgtgtccgaacctcccataaaaagaaaaatcagaagaaaaagaagatttttatgttttacagcatataattcaaaaacattttgtatctttgcagtgttaataaagaaaacaagatgtaaaaccgctcttcaaaacgtggagggcaaaaaaagaggaaacaaattatgaaaaagaatgcaaatgaaaaaatcatgatgttacagtaccgtattaaacgttatcaagcaatgggaaacggtgctatgtgccaaaccttgaatggtaaacttcaaaaactgctgacgaagcagccagccatgtaattaaacacactaatatatatcatgaaaagagcggagcaaccacactggttctccgctctttctttttatttcttcttcaaagtcacatcactgatttctactacaccacccttattctgtccaagaatagccacgtaacagtctttcaggatagcagcgtcatcatccgtatcggacacttccagagcaggatttgacttcttactgctgatagcattcactacctgtcccatgtcatagtaaacaaccaccttcgtccatttgccggcatccttgattttgaagttgtactgtgcaccggaagcattcggctgggcatcagcatcgtaatccctgcgcataaagaaagtagtgttcagtttaccgttatcatttttttcctcgttcgtctgcttgatatatacgctgaccggagttcctgcctcctttgcttttgcataaaaagtcaacacgtagatacctttctccaagccgtctgtaatacgttgaccaagaaatgctttataccaggatatattcttctcagcacccgaattatctattttcatcgcgttcggatacttggcatctccggtctgctcccaagcgattgttgtcactccgtccgcctcattattcataatgaaccactcacctgccgtagccttgttagggttggttaccttgttcgttacttccgtagcaaacttttcatttttgatcagattctgcgcactcacgcttactcctgcgatagccaaaagactaactaataatacttttttcatcttactgcgattttattgtttatacgttatttcttattttcactctgcttgctgaatcctattttatttgttgaataacaaacttataatttccagattctttcttttcgtttgattttagtgtgatgcgataaatctccttaccccatacattagagaggcgcggatcgtccaattggattgtttccagttcggctttgaactgagtcggatagtccagttccactttctgcccctttacttcaatctgaattttgcccaaggacgggaaagtgacattgccccaagtcatgaaattcacctgattgggagctacggcctcatccagcgtgtagctgtcggtaatcgtcagtttccggtcatccagtgtatacgaccgaatccagcttttcacttttgcttccgacggataggcggcagcaatatcagtagagaacatgcgtttcttttcattgcaaatggtatttgtcgctttgtattcctgtccgtatttctgcggtataccattaatcatcggcagattatgataattactctgcattgtccaaatggtgtaacggtctttaccaaatgtctgcttggtatatgtacctacccctgcatcaaggattacgggaattgtattcacatataaggaaaacgttcccacatcattatgattatgactttcgttgttgaatccgcctttggcagccacgaacattccattcttattcttcatgtaacagaactccgtctcgggataccaagtcacgtccggcatatcatgctttggagtctctttggcaagatcattgcagcaaagcagagactggagcgagcggaatgcatcgtttcccatggtcgcatacggttttctaccattcagcagataagcggcaaaatgcatcatttcattgctgtttaccgctttaccaaaacgatagatcagtagaggatcgccaccaccttgcgcggaagcatcggcaaagttcaccacccaaccattaccgacataagaacgggacatatactctcccatacgccggatcatcggttcattcaacagggatattttaccacctgtaccatcagaaagtatttgcaaataatcataaagtttacctgccgcgtgtccccaataagaagtcccttcttcgcaagcgccgtcagacttcacaaagttgataaacttatctaccgatttcatcgaacggtatacagcttttgccaaacggtctttattgttctccatcaaaaggaaacactgcaaagcattggagttgcaccaaggattccagttattgataatctcacccggttgccagttgaacgccatccaccacatatcgtcatcgttcatataagggtcgaggatacgttccttaatagctttgcgcatttgcagagaaaccaccggattgattttgtcgaaaggcttacggaagaaatagtgcacccaagccatcaatgcaccatatccgccggaaccaagatcaatgatctgttcgcggaaatcaggaagagaacgtttgctgctttgccggggcaggtgagcagacagtacccatgaattcatttcgcaactcatgtaagccccgttgagtagctgatcgatgaagcgtcctttgccttccgccagttctgccagcatcagcgtattcaatgcctgacgattggcgtcatagggaacttccatgattttacgattaccggtccgctcatattcaagataggcggtggcaggaatcagttgccatttgtagtcgaggagcttctcgcctgccgcgataagacgctgcttgttggaccccatcaatgagtcccaagcggcacggtcagtataggccggataaggtacccatgcctgtttcattaccagcacattcttcaacgtagtttcatctgccgctttttgcagcatatcgcgttctgtataggcattggctttgaaagagaaacttccaaaggtagctaacagaaaaacacaaattaaatgcttcattcgattcatggtattttgttcgtttaagtatggcaaagataacgcatctctcaaaaagtaaggtgagcaaatcatacgaacctcatgacaaaaaagtacagacttcaaaaaaagtacatccagaagctctcagccctctcgtgaaacagacgctctgttcaaagcaaacagaccttctatttagggcaaacagagccttcattcagagtaaacagaggttccgtttgaaaaacatcctgttgattataaacagaaacttcatttgagcttctataaaatttccaccgatggtaaaacctgaactttattcccaatcgctaaactcaaaactgagctgctcccaaactccatgttgttcatccgcctcctctttcggattggaaacagaaagcccgatcaagcggataggatgctgttcgtactccacacttttcaataactctttagcgagtggaagtatgcgatctaatgtatacagctcctgcgactgcgtaatacttcgggttatctgactaaaatcatgaaacttaatcttcagagtcaatgtatttcctttaaactctttacgttgaagacgttctattaattctaccgctacatgatacaattcgatgataacggaagagtgaaccgatatatctctttccagcgttcgttcacaaccgatagacttccgaatacgaactgcctcaaccggacgctcgtcaatcccccgcgaacattcataatagagcgcccccacctttccaaagtgggccgtcagcatttcgagcgagcatttacgtaattgaagaccattgtgaataccaagcaaatgcatcttctttgctgtcacaggtcctactccccaaaaagattcaatcggaagtccggcgatgaagtccagcgcctggtcaggatgtatggtacatagtccatccggtttccgatagtccgatgcaatctttgcaagaaatttattataggagactccggcagatgcaaccaagttcaactgttcccggatacgaagttttatctcctttgcaatatcaactgccagagagattcctttcttattctccgtaacatccaaaaaggcctcatccaaagacagaggctcaattatatcggtatactcatgaaagatttcgtgtatctgacgggagacggacttataaacatccattcttccggatacaaaaataagctggggacataaacgtttcgccttctgagaagacatggcggaacggaccccgtaacgacgggcttcataactggctgctgccacaactccccgctcctcggcatgtcccaccgccaagggtttgccacgaagttccggatgatcacgctgttctacagaagcgtagaaggcgtccatatcgatatgtattatcttacgctgaaacacttgtattcaaattccatagcaaacttactataattttccgaataaacagcctctaaaataatacgcgcctatttttttagaagcacaggacataaaaaagattcgatatcatagcgattccatttctaataatactatatttgtatattgttatctataatctatcaacaggaaaatatttgaaatacaaaccataaagtaaatttagtattatgaaaaaactactattctatttattcattctatgcagcacttccatagttgctcaaaatggaattacttttgaagttgaacaactctccaagcccgaaaaattatatcccgtgacttcccctgatgaaatctacagatatctgatgctatttgacaatgaatcaaccattcgaattacagaaaaagacatctggaaacctccatttaatgtaatagccaagagtgaatctcctgacagtttattatacttcgggtataattcttttttctgcggtatgtatcaggcttatgcagatcataggccgttcgttttatctccggatatgatttggctactgattaatcaaggttttgcccaacatgtgaatgccaaccatgagtctttgagaaaatattttgtaaatttctccggaaaggaatctttaattgtacaatcccataagaaactgaaagacccgagtcttttatgggaagaaattttcccgcagtttacggaacagataagaaaagaggtaggaggccatttggttgaaacactcacttgtaatttctctacaacgacctctttggaaaagactgtttctgaaataacaataatggaaacggtaaaatcatacttcgagtttatcaccataatgattgtttgcggtattccggaaatcacgcttgaagggacaccacaagactgggaaaaagttttaaataaagccagaggactaaaagaatataaactcgaatggtggatttcacaacttgaacctcttttggaggagtttgtgaaggcatcaaaaggaacaataaaccaagagttttggcgcaatatgtttaaatgtcattcgccaaagtcatgcggagctcccgagacttttgatggatggatcattaaattctttccttacgacaatgaggggaaaagaaataatctaaaacagattgtgggtcgtaaaaagcttccgagcgagatagtaaaagttgatttaaagtatattgaagcatacaatgacaccgtaattgaaacaccactggagttgtggtccggtttcatcggactcaaacaaaacaatgagaattttgcactgagaccacaaattggctggatggtcaaaaagaaaaacacagacaacaccggactcataaacagattgaaagccgatgccaaaggcaggggtatcaaccttagagtgaaagagttcccttccgtcctgctgaaacttgaagaaataaaacagttggagcttacctttattaatgaaattgatataccggacgaactgtcaaaagtgaaaatcgaaaggttgaagctatccggcagaattactaaagaagagatgcaacgtatcaaaactttatttcccaataccgacattaagataaacggaagtagaatataacaaaaatattaccgagtaattcacagaaacataaaagaaataatcaggatttcatataaataaaaaataggggctgaattctgcattgagaattcagcccccgctatttaatctacctagaaaacaaacctatatttattcaagccgaaccctcatatctactaccgtcggctctacaaaagactgactaccaccggtttcaccacgcaaaccattattggaagttgcgtcattatgattcggtgactggtcgagcacataccacactccgtcccgttgttcgatatcttctccattcagtttccaataaccgaccagaccatctgaacctgaatcgacaaacatcatattttcacgaatctgattcgcagtacgggctaccgaccataaacgaacctcactcataaatccgttccatttacgattccggtcatagtcataagcataaccgatgcagaaacgttcgttcaagtcgaatgtcagtgagcctaccgtcttttctgctattttctctccattgagataaagagtagccattcccgcagaagcatcgtaagtgaacgctacatgataccactgattcaacaggaatatagatacatcgggcatctgaagtgcaacacttccggccatttgaagctcgttatcaggatgattcaagtcaccggtacgcataatcaaagtaccttcattgcccataatggtgcccagattcttccaacgttcggcataaaccaatgcttcgtaggtgacagaacccattgttttataagcagtcggcagacgtacatcaagccagcccggattgatacggtataccttatcaataataattggtttccttactacaatataagtaacgctcgaactgcttatcttttcaatgtccgtactgttcactattacaggcagaatatacgttaccccgtcttcccccttggtaatgttctttaccgacaatccgcagggatcagcatacagttcgcctgctttaatggtcgaagaagttcctgtcatttcatagttatcagtcgccagaagctgtccggtcgtcccgtgtttatgattgtagtcatccacaaggtcctgccctcctacctgatagttcacatttacattactcttcaccatcgttgaaagccgcgacaccaattcgcactcgtaggtatccgcttcaacttccactcttatcacattactttcaaagtaaagtttcggttccaacagatcgctttcgctgtcgttgcaacccacactagagaaagacaatgcaactagtgcacctgcatataagattttgatacgtttcattgctgttctgtatttttattagattgattgtccatatattcctgataagcctgcagattgatctgtatagcatgacgcacaaaattgtaatcacgggcattatcatagtcattatcaagtcggaaagcaccgacgccacctttcggaccattggcatggttataagcagcctgagtcaaaagtacaccaccggtagtccaggatgactcaaagttctctgtaaagatgtgcttacgatagtcgtaatattctccacaccagctttgcaaggtactcactcttcgatcgagattggagtcaccatatgcctgagtgatgaaatagtcaaaataaggagcagattctttgttagagttccatatttcaccgtcaatcataaaatagtagtacttaccattcggacgctcggttgccatcggaccaaagtattttcctatctcttctaccagataatgcagaaactcaccacgcggaccacctctgcggtctttcagactgcctacatatcttccgccgtcaccaccattatcgggttcccagtcaatgtccagaccatcataatcagtcgcaacaatcgtgtctaccaatgctttggcataacgttgaatggctgcgatatggtcttcagcacctttctctccactggtaaatccccaataagcttctgttgccttattgaccagttccgtgatttcctcactggaagcattcgggttttccgcctgtactttttctgaaacggaagcaggcgtaataccagttccaatattatgcagaatgtaacaaaccgtgatcttaccgcctttcttcttttggaaaatctccttatcagccagtttcgcttcattcaagccgaatggaccactccacatcgataccatgtcgatgctgtccggcaaagaagccaaatatcctttacgaataggtccctcgggagaccagttgctgaaccatccgaagaaaataggacgtccgtaaccctgactggttgccttccatgcacgaagatcggcataatactgtgcactttcttcattgtccatcgtgttgtaaccgccgatatgttcaaagtccttgctctctatatcgacacacgacgcaatcattatccctataacaggaagtatatataataatcgtcttaacattttcatatgaatcatagtttaatagattttatttttacaatcccaccacaactgagtagttgctttgtctttatcaagaccgcccaagagcttcaatgcttcttcataattggctctatcctctgccgactgatagaaacttacaggatacaccatacgacgaataccaccttcacgagtaacgccctgtccgcggttggtctgcacctgattcagtttcggataaccggttcttctccactcagtccatgcttcgtgaccgttcggatacaatgcaatccacttttggatcatgatcttctccagtttttgttccgttccaccgctgaatgcgggtgttgcagtagtaggagccgcagcattgtaactgtaataggaggctctcatattatgggcaatcggagtcaatccggaagccagatagtcgtctacagacgaactgataccattttcatcaaatgacgtggcaactccttgttcgtacagtgcttccgcatcaccaaattcgcttccccatctcaacgcagcctcagctctcaggaaataaacttcggaagcacgcatccagtaagtcggagtattcgaggtaatattgggcttggagaaatcggtataaatcgtattctgctgattggcattgccgggaggcaccgcctgatagttttttccatcaaaagccgctaccgcatacgcactgggagaagcttcaaaataagcactcaaacgcgggtcctgatagcccaacaaataagaaaacatggaagagcccatgcggcactcattgtattgattggccagccaatcgatgttgttacgaaataccattccggctccggtgctcatctgtgcctcgtccgatttggaagtcatcactccaaacggatgattcaaagcctgacgggcatatttctgtgcagtcgtttcgtccgcataactgatacgcattgccagacgcaacatcagcgaattggcgtatttcacccattttctcgtatcaccggcatatacggcatcataatcggcaacaatagttgccccttgttccgctctcactgtcaaggcttcgatagcggccgtcagatcggcaaacatggcattgaatgcaacttgctcgctgtcgaaaggtatcaccagtgcaggttctcctgcatgggtgtaaggaatgggaccgaaagactcaagcgttttgtgccaagcagatattttcagaatctgagccaaagcaaagatttccggtgtttcgttcttttcggattcttgttttatcttcttccaagaagacagcagtgtcgtatatgagttggtataggtagccgccacccaattgtcctgtaagtaataggtagtattgttgctaccgctataccagttattattctgtccgaaaaatccgctccacgaatcggctgacagattgtatgcaacctgatactggttgatggcctccgtatcgtcagcctgagttcctacggtgattacagctctttgcatcgccataacagcacctccgacagcaacaccatctcttatacccatttcgtcggtcatctcgaacggattggtgtttaactcttcgaagtcacaagcagtaaagagcgacaaaacgcaaattcctgctaatagtttatattgatttatctttttcatgggtcagttataatttaaatttaataccgaaaccgaaacttctcacactcggctgcataaaatagtcattaccttgaccgtaagttcctacggacggagtcagttccggatcgtgcggagctttgctatagagcatccaggggttattggcaatgaatgacaaagtaacatctttcagtacattcttaaaccaaaggtcggggaacctgtaactcaaagtcagttcttgcagacggatattggttgcactatatacataatatccggaagtggtatagtcacccgtacctatcagctgataatacgattgtgcatccactctcccttgtccgggcagtaagacaccgcctgcatcgcgtgcttcggcagacgctttggatactccgaagcggtcgagaatagcctgagtagaagaagttaccacaccgccgaaacgtccgttaatcaggaagctgagtccgaatcctttgtatgacagcgagttgctccatcccaggttaaagtccggtgacgtcttgcccaagaaaaccggttcaccttgttcgagtccgtacgagccgtcttgcttgatttcaacatacccctgactgtctttcttcaggaaagtattggcatatatatcgttgatgctgccgcctacttttaatataacgcgtccgttgtctttccttacttcgggtacgttgatgggctcggggctcatgtcagtacgatagttttccaccatttctttgatttcgttgacattgcgcgagaaggtcagattggaggagaagctaaagtctccgaagctgtctctgtatcccaacgatgcttcccaaccgtgattttgtacattaccagcctgcaaatagatttgtttgtaacccgaaaattccggcaaatcgccaataaaggtctgattgtatgtattcgatttatagtaagtaacttcggcactcagtttattccataaacgtacactcaatcccaattcataagaacgggtacgttctgccttgaaatcagtaaaaggatagatgcctgtgggagccagtgcaccaccgataatcggagtggtcacagttcccggagtaagtcccgactgtgataccggagaaccgacttccgtataagacccgcgtacctttaaataggaaatgaactcgggcagtttcaccatttcagagataataccggacagacctaccgagggatagaaaaaggattcttcgctggtgtttaccaaccgggagttccagtcattacgacctgtcaatgtaagataaagcatacttctccagcccagttcgacgttggcaaagatagcgtgattacgtacgcgactgtcacctccgtcttccgagatacgaccgttggaagggtcgatgttgctggcggcaaacaggtttgttactccgagcaaggttcctttgtagcctcttgccagcgaccagtagttagagtagctataacccaagttggcagaaatattaaaatcgttgaactgcttgttgatatttaacataaagtcggcatactcctgacggtctttgtaattgctgtaatcatacagacctttctttccttcggcaaatttctgatcggaagtagcataaaccttacgttcaaactgaacatgagtatcgtccatacgataacgtccggcaagattcatccaatcggtaatcttatagctcagaccgacattaaacatataacggctcttctcgttcgttgcgatgttgcgataagcagtccagtacggattctgcgaaccataggttgcatcggcaatcggccaatactgtatcggaatattgcggctctgatcataacgctcgaaagtcttgatatcgtcgaagtcttctccacgggggaaaaggtaggcagaaatcaccggattccagtattgtccctgcgataccatgtttttatcttcctgtttcacataggacgctcctaaatccaactgcaatttatcgtccagaaaagtggctgtattgcgaatggtgaagttcagacggtcataagaattgttgggaacaataccttttgaattggtggatgaaaccgaagcaaaagtttgattctgctttgtaccggtagacaaggtcaacgagttgataaagttggttccggtgttgaagaaatcactcttgggatcatacgaattcggacgggccagtttgtcaccccagctttcgaacataccttctttatttccatacgtgttctggaattcgggcatcatgtacgctttgctgaattcggatgaagaagaaaatgatatctgtaatttaccttcctgccctttcttagtagtaatcagaacgacaccatttgccgcactactaccatacaaagcagccgccgaaggtccgctcagaatagagatactctcgatatcttccggattgaaatcagcaataccttccgttccggctttgccttcacccatgataccactatctgtgtttcccatattagtattaaacaaagggataccatctactacatacagtgcattgttgtcgccttcgatagatttagcgccacgcataacgacacgcgtcgcaccaccgacaccactaccactcttgttgatacttacaccggctatcttaccattcagtgaattgatgaagttggcatctttaatgccggttatatcctcgctttttatctgctgcacattgtaagacagtgccttttctgcccgcttgatacccaatgccgtcacgactacttcgtccagcacttccgtatcttgtttcattgtaatcgggtaaaagtccttattggaaacagcaatcagttgagttgcatatcctatataagatattttcaaacgggcattaccgggacttttaatcgaaaagtttccgtcaaagtctgtaattgtccctgtagaactgccgtccacagagatatttactccgatcaggggttcaccattctcatcggttactttccctttgatatctttgacagattgtgcagctgccggtttcttctccgtaactataatataattaccttgaatctgataagagaaacctgttcctttcaagattgcatcgagcgcagtagtcaccgatacgtcttccaagttaagatcggcaattttctttcctttcaattcggaatcactataatttatagacatcttcgactgtctttccacagttttcaatgcatctactacagtgatatctttctgctggatagtaattttactatcactttgagcaaaagcaagggtctgcatcaataatagacctaaaaaaatgagaaagactcgcttttgaacaacattatctgctcttttttcgtaaatttgtagcatctttttagtattagttaattggttattattctatgatcaattgaaatagcgtcgagatacgctaatattagaaggacaatgatttcacatccgggagaaacggccatttcttccggatacttttttgcatagtacattaagttaaaaaaggttcaacaatcgtttttctatattttatcagttatatagcatttattccccttaattatatatttcacatcccctgccacctgtgttattatcttcatcacctcttccaaagtggcttgctgttggaaacggaaactatacgatttattgttcaggctgtgaaggctataaacaaaggtatagggaaatttgcgttcgagactcgtaaaaatctcatcgagatgcatatcactgaaaaccagctctccacgctgccaggcagtcacatcctctatccgaggcgattggaggctacgtttccgggtctgtttattatacgttatctgctcattgggtttaagtattacattagatatcagattattaaattctaccttcacactaccttccagcagagttgcaatcagttcattgttctccggataggcattcacgttaaactctgtacctaaagctgttatttgaaaatcattggctttcactataaaaggatgtttttcatccggctttacctggaaatttgcttcgccaatcaaatatacacttctggtcttaccggcaaactgctccgggtacagtaaggtgcttctcgaatttagcatcacccgggtaccatcgggcaatgtaagttctcgtatttccgccgttggtatgaaacattctaccaagtctttttgcggtttgtctttctccaacataagatagatagaaacagatgatactgccaacaggaaaatagctgctgctctccatataagtaactgatactttttaccggaaccgacagactgcattcccagattttgttgcatccgtaatatggactgttgcattccgcgaggtactttctgttctcccgcttgttgccacaacgtgtgaagtgcttcttttttttcttccgcatgattgtcgtcagccaaccatcgctgcacttttctacgcgtagccaatgaatactcattatgcccgaataactctatgatctgttgaatatagtttttcatcattaatttcttcctttatacactaaatacaactaaaagaaaaacactacttaaaggaaaatagaaaaaataaaaatagaagcactttttttagttctatcagtgctaaatacacctggtgctctaccgtacggatggaaacattaagcttttctgcgatttctttataacttaatcccttaaaacgactcagctcgaatattaaccttcgccgttcaggcattttttccaaagtcaggcgaacaaccagcaacatttcttcataatatatattattaagggcatcttccccttctatcaattcatgaagcactgttttctcaaggtatccttcctgatattcccgttcgatttgctgatgcttgaagatattcagaataatgtttctggtcattataaagaggtagttatctaattcattttcattgtcaagccatatttccggttgtaaccaaagcttacagaaaatatcttgagcaacatcttcagcatcaacttccgacttaagcaacagctgggcataattctttactttcggaaaattagaaataaaaaaacgctgaaacttcagctcaatttggttaacattattttccatatccgctaagattattatcgattacaagtataaaagtagacattctcaaagattagaacataataaagatatattattaatacttgtttgcatatatttataattattccgtatataaaacaaaaacacataaatattgacaataccaaatagccatattatcacaccaaaagagaatagagtgataggatgtataagaaattgactttgtatctaaaaagagataaaataaaggatcaacaataaaaaggggagtaaaagagaaaaactgcaaaaagaaaaagctctgataatcagagctttcatttgtttttaagtggagctggagggaatcgaaccctcgtccaaacgaggaaatcataagctttctacatgcttatctttgcctaaattttcgtgcaggagcagaaccaaagccatcaattcctgccttatcctctaaagtttcatcaaaaacgcgaggccgcttctgactatccccgatgttactgcaccactgaaccggaatgcttcggagcaacagcttccgagtgatgtctcgtcctggcacctagtgcctggattaagctaatctactgtgattcgattaagcagcaagagcgtaattagtttcgccagataaagttttgataactgagatttaagtggaaattaccgacccactgcatgcttacctaccatttctgcccgctgtcaaatccagtcaaccccatgactttgtaacggtctggaaatcaaaagaaaacaatcgctattttatatttaagaaacaaataagggataaataatgcatcatatcctttcaataatcctgttttctttggcacaaagatacatattcttttgttactaaccatcatatatttgcaaatattagccgatgatatgctatccggtatacagagatatatcatgagcggaggcagacttggctcccaaacatacaacatttgtaggcccggttatttccaacttaccaacattatccgtacatttgtggaatataataaatactatcaacctcaaaaaagcaatggaagaaccatttgattattctcaagtacctttcacattcggaatgtgcgctgccgaaaattgcccgcaagcctcgacttgcctgcgacagatagctttaaaacacgcccctgcaaacaaagtttttctgccaattatgaatccaaaccatataaagggcataaaagaaaaatgtgactatttctgttcgaacgaaaaggtgcgttacgccaaaggattcatgtgcacaataaatgcactcacagtgcgcgtggcaaacacgttccgctatcggatgatcggatatctgggacgtaaaaactactacttgaaacgcagtggcaaactggcgctcactcccgccgagcagcaatggattataaacactgccaaagaactgggagtcattcaaagtgagtatttcgacagttatatagtagagtatgtagtgtactgaataagttgacacttcaaaaatcgaaaataaagatgaaatattcgaaaaagcagtacaactattacagtgatgatgaacgaatgtcttatattcgtgagtatttatcaagtcccgagagcaaatctgagttttgtaagcgtaacggcttttgtgccaagcttcttacttattggcttaacaagtatcaaatagaagacaaagatatgggtagatcctctaaaccagtaaatagcgatgctattgattctagtatttctgagctccagaaagaactatcgctattgcgtgctgagaaccgtaaacttcatcgggctcttgctgatgagagtttacgtcacgaggcgtgcgaagaactcatcaatcttgctgaatccacgtatcatatcaaggtacgaaaaaactccgatgccaagtaatcgacaccttgtcacagaggcactcaccccgacgcaaacgtggttgtataaagttcctctgtgattacttcggcataacccgacaaggttattacaagcatgtgaaccgacatttggaggttgatatccttaccacaagcatcgtgttgtactgcaaagaactgttggaactcatgcccaaagctggtatgcgcgagttatacgcctgctgcgtgagtaagtttggaccaaagatggttatcggtcgtgatcgttgctatgacatttttcgctccaatggtttgtgtcaacgtacaagtcgcaagcgtcctaaaacaacgaattcgaaccataattactatatctaccccgatctgttgaatgttgcacccaaatttgtcgctacaagattgggcgctatggtagtggcggatataacctacgtaaacaccggtcagggctgggcttacctctcgttgcttaccgatgcgtcaagtcgtgccatcgtgggatatgcgctttacaaaactcttgagacggaggggcccttgaaagctttggagatggcaatatcattctatgagaagtatcacatagacatgagcactcttattcatcattccgaccggggtgtccaatattgctcaaataaatatgtagagaggcttaaagagcatcaaatcaacatcagtatgacgcagtgtggtgatcctttacataatgcattggctgaaagaatgaacaacaccattaaaaacggttggctattcgactgtgatgatgagagcttcgagcaagtaagcaagcgcattgaagatgctgtatatgtatataatcatgtgcggcctcatcaagggataaacatgaggacacctatggaagtggtcagcgaaacgggaggattaacagcataatacccgctcgtcgggacgggtggtcccgccccttgccgctagggcgatccccgaccgaagagtttttggttgttggcaacattacattttcctgaagaaggcttgcgtaaataaaggaagatgcataaatttgcaagcaccaacaaaagacaactaacataggaataagaataacaaaagtaaacctatttagatattaaagtatattgagtaaactaattcagttataacaaacgaagttgtcaactaaaaccagtacacatcagtataactgggacaggtaagggagatttccgtttcaagtaaagaaacgacagtttcctcgtagagaaacgcaagtatccccgtagagaaacgaccgtttcctcgccgggaaaccatcgtgtcctcgtaagggaacgacaaggaaactgcaatcatctattatacaacacattagtatagactaaggaagttgctatctaacaaaaagaacctatatatgctaaaaacttttgcaaccatctgtattatcggtatgttcacatctagttgtacatcaaaaaaggcttcccggaccgaaggctcccatgaagcagaacaggaactgacaatgattgtcggtacttacacttcgggagacagtaaaggtctctatagtttccgattcaatgaagaaaacggaaccgcaaccgcactcagtgaagcggaagtggaaaacccatcttatctcgtaccttctgccgacggcaaattcatctatgcagtcagcgaattcagcaacgaacaagctgctgccaatgcgtttgctttcaataaggaggaaggaactttccgactgctgaatacgcagaaaaccggaggcgaagatccttgctacatcattaccaacggaagtaatgtggttactgccaattacagtggaggaagcatttctgtcttcccgatcgataaggacggggcacttctccccgcttctgaggtggtgaagttcaaagggtcgggagccgacaaggaacgtcaggagaaaccgcatctgcattgtgtccgcatcacgccggatggcaaatacttatttgcagacgatctgggcacggaccagatacacaaatttattgttaatccgaatgcaaaggcagacaatgaagatgtttttctgaaagaaggaagtcccgcctcttataaagtagaagccggttcgggtccccgccatctgacatttgcaccgaatggaagctatgcgtatctcatcaatgaactatcgggaacagtcattgcgtttgaatataacgacggagagttaaaagaaattcagactattgctgccgacactgtgggagccaaaggaagtggtgatattcatatcagcccggacggcaaattcctgtatgcaagtaaccggctaaaggctgacgggctggcgatcttcagtatccatccggaaaacggtatgctgacgaaagtcggttatcaactgacaggcattcacccgcgcaatttcattatcacgcctaacggcaagtatttgctggtggcttgtcgggatagtaatgtgatacaggtttatgaaagggatacggatacaggattactgacggatatacgtaaagatataaaggtggacaagcctgtctgcattaagtttgtaccataaacaggaagaagtacttggttagcaccggactgaaacaagagtacgccggtcctaaccaagaaccaatacttcctacccaatcagactacgaaaagcctgaataccctgatgattgatatccaatctttctacctcactcagcaaccgaacggatttctctttttcgttcaatccccaataacccaatgccatcatatatttgcagtgaatgacgtttcgtatggtcaggtcatcttcccatattaacaaatcgggtagtgacactgcaaaataatccattttaaccttgtcaaaaagatatttctctccgtaagttgtcagtttatggaagcgtccgttagcctcatccatgcggttcagtttcaacaaagccagtccctgatagaaaattttatccggttttgcatcattgtagtacatggcagcagccggttcggtaggaccgacaatcgcttgttcccagcattccaccgctttgtcattctgccccagaccttcataagcgcaacccatgaaataatagaaatcattttcctgtgcaccgtgcaacttaccttcacccaagtgatgcggatattcaagacactctgccagcaacgagacagcttcactgtaattcccggcttcaagtgctttcttcgccagttccacacgggcaaactgatattgtcccggtacttttccttcgccgccttcccacggatggaagatatgcgcatcaagtaacgttttagccttttcatactcgcctgtctgattcagcaaagtgatctcttccagtacgaggtcgtcacgttgcgctatcaattcggggtattgctgcaagaacgccagacgttcggaatgcggacgacggacacgtttatagagctgatccaattccatcaacacacgtgcatcggtcgtatcgagttggaaagcacgttccatatattcgatggccgttgcttcgtcatcctttttgttaaagttagccaaagccagattacgccatatcgtagggaacttgtcatccagtccggcggaagtttcccatgcttcgagtgccaaatcgtactgacgtttgtcgtagtacaaattacccagataataaggtgctttcgcatcattcgggttttgttccatagcacattgcaaagcaagaatggcttccaggcggttagggaaacaatagtccggacaagcgttggcagcatcggcaaatgcctgttccgcaccggataacttaccctgaacaagacaccaacccaagtaataataagtcatcggtgttacactgccctcagcgatagctacattccacaaagaagcggcttctgtccagcaaccggcagcacaataatcaagtgcgatttcatcatagttgtgagcttcgccacgcatcatcgtttttaaagtaagcaagtcttcggtagcattggttatcagatatttctcataacggcaaccgaagttgaatttatcaatagccaatgaatcttcaatcacttgcaaggcttcttccgctttccccatctgacggagaatggtcgttttcagagcacgtgccttatgattatgccagttgcggataagcgaacggtccacttcgtccaaagcgtcttccagacgtccttgcatcgtagcaatctgggcacaggcaaaataaccggcatcctgccaggctgcattccagcatgatttatagaaacggtcgtaagcctcattatagcgtccctgatatttcaaggcaagtccgagattatagataggttctccatcatacggattcgggttgcgcttctgcaaggtcttcactgctgtaagcaagtattgttcagctttccggaaacggcctttacggatataccataatccgagtgcattattgctacgtacatcgatcgggtcacggcgcaaggcttcttcgtaatagtctaccggattataggtggcgtgtctgtattgttccagatgtaaacctgtcagatagagttgctcggttgtttttatttcttccggcaacaaagcagcttcggcagcatccggaatcggttttacttcgtccggttcggcatgccagtaaagcagttccttgccgtttgcggtgatttcaagattcagtttgttcaacttctctcctgctacgtctaccgtttcattcaatagttcttccggagtaatggtcacttgcctgctataatacacttttccatcgtcacctttcagcactacattaaccacctgcttagatgttgcgaatatcttgaaacgtacctccttttcaccttccggttctatgttcatcaacaaatctttgcttgcattcttcaccactcccagttcacggtaaggcaggaagtactgtacgaagctcttttcttcgtaaggttgcagccatgtaaagtccggttggttctcggtatagacaccagccatcagttcgatgtaaggtccgtcctcgtcagtcagattacggtcccatgcacggccgaaatcaccgttcccccatgtccattgctttttacccggagaaatatgatgatttgccacatgaagcatacctgcacaagtgtcgttttcgtagccaccctcaaagttgtaacgggagttgacagccatatacgaagtaggaactttgatattcttatagttcgaaatgtctactccggcagaatagtccatcttataataagtacccgttgctatagggaagctggatacggcacgcttcccatgatcgaacaccgcattgatgtcgggcggaaatacactctgatagtagtcgttcaccgctacggcaggattcgcccaccacaggaaggtttgcggcacttcggtgcggttgtagagcaccccttttatttcgagaaaagcatgtcccggacgaagcgtgaagcccgccatccctttctgatgaaacatccgttccatttcgttcacccatacagtgacgctgccgtcagcattttcttcaatcgtcgtatccacaggcatataagtactgggacgatgatgctgaggccagttaaactcaatacctcccgaaatccacggacctgccagccccaccaatgcaggtttaatcacgtgattgtaataaataaaatgacgttccctgatcttatcataagccatttgtacacgaccgcctaactcgggcagaatcatcaccttgatgtattcgttttcaataaagatagcttcgtattccttatctactttttcatcggacatcgattcgatgacaggataaggataaactaccccactactgccctggtagacacgtttctccaggaaaataggattcttttccggtttacctacttcataagtaggaattacaaccttttctctccatgcttttaccatgatattattaattatatctttttattttatcagatctttctccaatgtctccagcgatttcccttttgtctcaggcaatgcacgcaggaagaaaaggaagccgaagacgcagatagccgaataaatccagaatgtgccgtaactgcccaatgcagtattcagcaacggaaatgtgtaggtaagcgtgaaactaccgacccacaaagcgaaagtacaggttgccatagcgacaccacgcacgcggttggggaatatctcagcaagcagtacccacgtgataggccccaaagacatggcataacaagctatcgccaacactaccagcactaccataaagaaaccgctgacctgaaaaaagtaacacgtaccgagaaccagataaatacccgccagtcccccagcccccaaaagcatcaaagcacggcgccccaaacgttcgaccgtatagatagccacaaacgtaaagatcacattcgctacaccggtcactacaatattaaaaagtacatcacccagcgaataacccgccgactggaatatttcctgtgcgtaattgaaaatcacattcgtaccgcaccattgctggaacacagccacgataacacccagtacgagtaccttacggaacggacgactgaacaacaatttcaatcctccttccgacttggaagcggaggtttgttccaccatttgaagttcccgctctgcatagcggtttcctcctatccggctgagcacactccatgctttctccctcttgcctttcattgccagccaacggggactttcgggaataaaacaggctagcagcaagaataccgctgccggaaatgctgctccccagaacatccagcgccatcccatctgtccgttccatgaagcacagatatcggcaggcgtaaagtcggcaggtataggctcggctatcagccagttggctatttgtgcaccaaggatacctaatacaatagtcagttgattgagggacaccaatttcccccgaatggaagtaggagctacttcggcaatgtacatcggagacagccccgaagcgataccgatgccgatgcctcccaaaaagcgtgctgccagaaaccagccgaatacggaaaatgcaccggtagcgtatgcggaagataaaaaaataaatgcggaaatcagcaagagaggtttcctgccatagcggtcagccatcataccggctaccatagcaccgatcagacagccaagcagggctacactcatagccagtccctgcatcgtcggcgaatcggcaataccgaaatagagttcatagaaaggtttcgctcctccgattaccacccagtcatacccaaagagcagaccgcccatcgcagaaaccaaacaaatggaatagacaaactttttattataacttttcataccactagaagattgattaattgatgttgcaaagatagagcgtatccaaagcacaaaaaatagaatttcattttataaagatggacaatcttatttttaatgtattatttgacagatcgcatacattattatatatttgcgcagaataaccaattatgtactatggtaaaactaaaagatggatttaccggggaaagagccttagtattgccccgcatcatcgttgataagatggaagaggacccgctgacctccatgctgcatatcactgacatcggatattatcccaaagccaagcatcattttcgggaacggaaagagcccatcaatcaatatgtcttcatctattgtattgatggcgccggatcttaccggatcggagaccaggaatataccgtctccgccaatcagtattttattcttccagcaggagtcccgcattcttatgcttccaacaaatcgacgccatggactatttactggattcacttcaaaggtattcttgctccgttctatgccaaagacgccaaccgtccgatggatattcagcccgaacaacactcccgcatcagtacgcggatcaacctgtttgaagagatattcaatacactcaaaaatggttatagcaacgagaacctgcgttatgcgttttctatgtttcacttttatctgggaacgttacgctatgtccagcaatatcgtaatgcaggcaccaatgaggcagaagacgagggaatagtgaacgttgccatccactatatgaaagagaatatggagaaacatctgagtctggaagagatatcgacacaaatcggatattctccgtcgcacttctccatgttgttcaaaaagcaaacgggacacagtccgcttacttactttaatctactaaagatgcagcaggcctgcctgttgctggataccaccgatatgaagataaatcagatatgctataaaataggcattgaagatacttattatttttcccgcctattcagtaagatcatgggaatgtcaccgcgggaatatcgtaaatcaaaaaaaggctgactaaaaagtcggtggtaacttccaactctcctccttcgggaaggaggggaattgtgggtagttcagactttttagtcagcctatataatcattcttatttcttctctatagtcagaacaaactggcgcaaatagacctgctgttcttcatcactcacattcgtgaagcggacaaacttcacaggagctttctgcaaaccggccgacaatctgctttctttctgcttcagatccaccgttttccattccttgccgtccgtagagatttcaaggcgtccccatgtacaaggagcatccttaccaaagtttatctgaatattctctcccggatagatagcatccagttctatttcaacactgtttccagccgcccatttcacaacttcattggcaggagaaatgagtacacggttcgctttcacctgcaacggcaggttcttgatctgctccacattactgatcatcttatgcggcatataatcggtagtggcatccagatgagcattaaacttttgattgaagaatttcacaactgtggcaaaagtccggtcaattaatggttttatcactcgcgtagctgtctttactcccggttgataaggattctgattactcgtctgatcgatatagaacatctgttgctgcaaagccttcacatgattgtatttccgcagaaaataagattcattccggccttctaccatcttcagcacttcttctcccatttcagccgtcagtttaaactgatgcacccaaggagtgatttccacaatcaacggtttgttctccgtattcatcaacaggatatcggcggattctttcatacgttcgaacgtatattgaagagtctcgaaatctgccttatcgtaatttttgccttctttgaacgctttcaggaaacgttcggcagccggttggatatccatagattcttcgcggcggtatccatgtccgttaggtcccaagtcggaattgtgcattgcaaagcattcaagttcttccgctgcacttggcagaatggtacggatcgcatccttccacgtctgccatgtatcatacttggcaggattccaggcataacttgccacactataaatcgctatctttgacgattcggcatgttccatcggattggttacaaagcccgacatctctttggcaatcgtagtatcgttgccatacacaggaccgagaagcagatgatcgcgcacataatcggacaccgggaagttccaccagatataagccggacgcttgattcgttcgttaatccatgaaatgccgtcacgggtaatatcggaaatgacacggtctcccgtccacatgatctgaatggaaggattgagtttatcgcccagcgtagtcagataattgccattagggttcgaccagcttttattatattccgtagggcacatcaccagttggtttatatccggttttacctgtgcgaatttctcatcaatgtagttcagtagttccgcttgtttctgcggattagtaccttcaccggagatatcatcaaagaatacggcgaacgaacggacaccgagctgatacatcttctcaaatttagcgagcagaagatcacgatcttcctgattccatttgatatcctgtcccggatggatcgcccatacaaagtcaacttcattttcgttggctaccgccaccaattcctgcaactgggcagcttctttgtcgggataaggcaaacgccagttgggagcactatgatacggatcatctttcggaccgtatatataagtgttcatcttgtttttaccgtaaaacttcagttggctgaggcgtgcctgatggctccagggagttccgtaaaacccttctaccactccccgataccgtacagaagggtaatctttgatttctacttcgggcagctttccgtctttcagcaattgcgcaaaagtttgcagagcgtaataagtacctcgttcgtcgtttccggccagtacgatttccttctcattcacagacaggtaatagccttctttgtggtcaggaatctggcggctatatttacgcacactcttgtcacctttctcaccaatagaaataagcatccctttcttgctgctttgcttaccggaaagcagttctttcagtacctttacagcatgcggattggcttcttccccgccattcagctgatagacagcaggcagatcgatggtcttgttttgaacaatgagttgttgaggaggaggttgcagactaacattctgcgcaaaggtagtaacagcacacaggaggcaggctcccaacagataaatcttgttgtttttcataagttgtaataatgggggttagttatcatgacttatatcatggtgcaaagaaacactaatttatcaaattaagcaaatttatgaggaacctagatcaaacaaatcaaaaagagcaaacaaaataatcataaagacatacttttctgatttattatttctatcttcgtccgctgttatactttttatttaaatacccccaattaccatgaaaatcaaacattttctacccctgctattgctactcggtagcaatgagatgcttacagcacaagaaatcgctctcaccccacaaccggctcaccttaccgtaaaagacggccgctttgagtttggcaaccaacttaaagccaaagtcgctccttatcaaggagacagcatccgtatggtctttgaatcattcaaaaaggaattgcaagaagcaaccggcatcaaggtttcatctactcaaaaagaagctaaagcaaggattatcttagatttgaacccacaacttcccgccgaagcttataagctgaacgtctcgaaagaacaagtccggattgaagcctcccgtccggcaggtttctattatgcgctacaaacgctaaagcaactgatgccccgcaacgtaatggcaggcgtagcaacgtccgaccattcacaatggagtctcccatctgtcgagattgaagatgctccccgtttcgaatggagaggttttatgctggacgaaggcagacacttcttcggtaaagatgagataaaacgagtgatcgacatgatggccatctacaaaatgaatcgtttccactggcatctgacagaagatcaaggctggagaatcgaaataaagaaataccccaaactgacggagacaggcgcatggagaaacagcaaagtacttgcatacggtgacgtgaaaccagacggtgagcgttatggcggcttttatactcagaaagatatcaaagaaatcgtagcgtatgcaaagaagaaatttatagaaatcattcccgaaatagacattccgggacattcacaggcagccgttgcagcttatccggagttcttggcgtgcgacccggagaataaacatgaagtatggctacaacaagggatttctactgatgtaatcaacgtagccaacccgaaagcgatgcagtttgccaaagaggtaattgatgaactcactgaattgtttccattcaattatattcatttaggcggtgacgaatgccccactaataaatggcaaaagaatgacgaatgcaagaagctgctgagtgaaataggttcttccaacttcagagacttgcagatttatttctacaaacaactaaaagattacattgccaccaaacctgccgatcaacaacgccaacttatattctggaacgaagtgcttcacggaaacaccagtatccttgacaatgacatcaccattatggcatggatcggagctaatgccgccgcaaaacaggctgccaaacaaggaataaacaccatcctgagcccgcaaataccttattatatcaacagaaaacagtcgaaacttcccacggaaccgatgtcgcagggacatggaacggaaactgtggaggccgtttataactatcagccgcttaaagacgtggatgctgccttgcaaccttattataaaggtgtacaagccaacttctggaccgaatgggtgaccgaaccttccgttctcgaatacctgatgttgccacgtcttgccgccgttgccgaagccggatggacaccacaagaaaaaaggaattatgaagactttaaagaaaggattcgtaaggatgcagagctatacgacctcaaaggatggaattatggcaaacatatcatgaaataagcaaacgctttcatttgactgccgataactggggagtgactaaaaagtcggtagtatcccttcaggaaggaggagtacccgcagggggaggtggtaggtgaatacgcagtccacttattcactgcaaattatagacaaccctattttacctactaccccggctttcagccacccctccttcccgaagggaagggaaggggagatactattgtctttttagtcccccccttccgtctttttcagaccatctcagttctttcactttttattttgtgccacacgattattattcgcctgtggcttcaccactaccccatttccattcttcgtacatttaatacattcctttcgtaatgtaccctccttcagattgaaaataagattcggattaaaatgctgaccgttaatgcgggtttcaaaatgcacatgctccgtagtagcacggccggtacgtccggtcagtccgataggttgtccggctttcaccgtatctccgctctgtaccaaattcttgaagttatgactgtaaatcgtttccagcccgttcgcatgacggactacaaccaaatttccgtaagcataatatggcttcgacatacgtacgactccatcaaaagcagcacgaatcgtatctttggcacacgtctttatatctgctcccgaatgtcctccgcgagttccgtaagcggaaataactttggctcccggtaagggaaaagcatattcatgctcttgcagagaatccaaatgcagatatatatgattgcttttcgcaaaaagtccgggagtagcaacccgtacatgattcacctccatagaagaaaaagaggatttactttgcgcataagcaagagttggtaaaagcaggactgtcaataaaataagtatgttcttcatgtattcctttattattcaaaatagataagctcgccgccatccgatccggcataatccctcagtaaggattgaatcatttcagcagcttcctttaatccctcttttccgttatacccgttgactatcgcgagaatatgagtagtcccgacatccatcttcgtacgttcgtggtcgcttgtcggtgtcccgattcctccaaaagaatctctgtacaccggcaatccttcaatgttcaaaatgccccgaccgataccttcgaaaggttctttcgctttgccaatgccaagttcaagatggttaccctgtatcttatccgcatcgaagccaccgatagaatgtccggtacggagagaaaccagattgataaggtcaaccaaagtatcaatctgatacaaagggatgccacgcatcaggcgacggcgcagcgcttctgccgacggacgataacgccccggatcttttccgcaacgcttataagcctcacgggtagcagcaatcacaggttgcaacttaatgtctgccatttgggtggtggtagtcaagtcttctgtgaaagtatttatttctttccaaagtccatcgcagtaagcagtattcttcactgctgcatatacggctgctccggcaaaaacagggcaggcgttctttatttcctgagatacttttatttcaaacatacttttattcaagtttatatcaacttacgttcaagtctattatttatgaatcatgatccccgacagaatccgtccggacttaatgcccaaacgccttgccgagaaaaactcgtcgtgatgaatatacgtacatatccgggcaagctccacctggccggacggcacaccgaaagcaaggatttgcatccggttcgcttcccacaagtcgatatgatgttttccggtttcctctttcctgatagaaatacgaggcatatcaaaaccattcttctgaaatgcttcgtacacttcctcacccacttcaaaagaagccaatgagatactcggaccgatacaggcaactacatcttctccacttgtgccaaactccttttccatccgcaacaaagtatcacgcacgatgtatgctaccgtccctctccatccggcatgaatggcagctatggcactatgtttcttatcatatatcaacacaggaacacaatctgcagtagaaatgcaaaggcaatatcccggctcgcgggtaatcaaagcatccactccgtgcagcatctcctgtcgttgttgagacgaagccgataaataagcatccccgatcagcaggcaattcgtctcatgagtctgcacaggaatcaccagttcttcgggtgtctgcgacattccttccatcagaagcgtttgattccgccggaccttttccacctcgtctccactgtagggcgtacagttgaatgacgcataatttccttcgctgcaccctccctgccgggtagttacaaaatgagaaatgttggagtatgagcttaacgactcataccccaacattcttttatctcttgtgattgaaatcatttttcttcccaatcctcttcttcgtattcgtagtcgagatcatcatcgtcgtcgtcagcgtcttcctcatattcatagtcgagttcttcatcctcgcccatgtccttgagttcctgctgcagacgggtcacgtctttcggacggtgaacaatgtcttctatcttattactttccttgttcagttcctcccacagaatgtctttcaacactgagattcccaaaccggaaacagaagaaatgaatatatgcggaacaccctcgggcaatgtcggttcaatctcgtccatcagctcctgatcgagcatatcgctcttcgtgatagccagcacacgttgtttgtccagcatttcgggattgaacgtacgcaactcattcagcaatacttcatactccttgcggatatcatcgctatctgccggaaccatgaacaacagcaacgagttacgctcgatatgacgcagaaaccgcagtcccaatccttttccctgactggctccctcgatgatgcccggtatgtccgccatcacgaatgactttccatcgcgataggaaacaattcccagattcggttcgagtgtcgtaaacgggtaatcggcaatcttcggtttcgcagccgaaatggcagaaagcaacgtagactttcccgcattcgggaaacctaccagtcctacatctgccaacagtttcagctccatgatcaccgtcatttcctgcatcggttcgcccggctgcgcaaagcgcggagcctgacgggtagccgtcttgaaatgactgttaccctgaccgccacgaccgcctttcagcaagatcacttcctgtccgtcgtccgtcacatcgcaaaggtattctccggtttcggcattatacactaccgttccacagggtacctcgatcactttatccgcaccgtcttttccgaaactacggttcttgctgcccgattcgccatgacctgccatcgcgtgacggtcatacttcaagtgaagcaatgtccagtaattacggttaccgcgcaagataatatggcctcctcttccaccatcgcccccatcgggacctccgttaggacaatatttctcgcgcctcatgtgcgtagagcctcttccgcccttgcctgagcgacagtatatctttacgtaatcaacaaaattcgattcagccatattttttatttattacaatttgtctactgcttcgcagatatcagcgaagataccatccatagtacccagaccgttgatatgctggtatttcttttcgttcttgtaccagtcaatcagcggagatgtctgtgaatgatatacatgcagacgttttttgattgtttcttcgttgtcgtcggcacgaccggagtctttgccacgtttgatcagacgtaccatcagttcatcttccggaacttcgagatccaacattacagaaacatcctgtcctctttccgccaacatcttctttaatgcttccgcctgtgcaattgttcttgggaaaccgtcgaaaattacacctttgctgtctttgaagctatcgaatacgcttgccagaatatcaatcatcaattcatccggaatcaactgcccctggtcgatgtaacctttagcagttttgcccagttccgtgccgttcttgatttctgcacgcaatacatctcctgtcgagatgtggttgattccatacttttctacaatacgttcgctctgcgttccttttcctgaacccggagcaccgaaaattacaatgttcaacatctttttaacctaaaaattaatttgtatttgaatttaatctactacagtataaatatcgggataattgcgtccgaaaccatcataatccaatccgtagccaacgataaaatcattcggtatttccatcgctacgtattctatgttcagattgaccttcagcttttccggtttcaccagcaaagaggcgatatgaatcgcttcggggttgcgtgtgcccagtgtatccagcagacgctgcatcgtcagtccggtatctacaatatcttctacgatcactaccgtacgtccggcaatgtcttcattcagcccgatcacttctttaattactccggtggaagtcaccccctgataagatgccaacttcacgaatgaaatttcgcacggaatcgtaatatgcttcagcaagtcggcggtaaacatgaacgagccgttcaacacactgaggaagagcggattcttacctgccaaatcacgattgatttcgttcgctacgcgaatcacttctttttgaatatcctgttccttaatggaaacagtaaattgcttgtcttttatctgtatggtatccataaccggtcattttaaaaaagttgtcgcaaaaatacaatttttattctaccccgtgcatcatcttctgtaatttcttcgagagaaggaacagaatcagtgaggcaacaccggacataatgacgaacagcatgaagaagtcgtacatggtagcgatctgataaccaaggattgatttcacttttccgtcttcgggatagaggccgctcagcatacctgcaaatttatttgcggtggcggtagaaagataccagatccccatcatcaaggaggcgaaacgtaacggactcaacttattaaccatagaaagcccgataggtgacagagcgatttctcccattgtatgaataaagtaaagccctgtcagccagatcatgctcacctttactcctggaatagcatctttcactccaaaacagatgaagagataaccaagagaaagcagtaacagaccgattgcctgtttggtaggggaagccggttccatgtttcgcttattcagaaagctccatataccgggcataatataggcaaggatcactacaaaaagcggattgaatgactggaaccacgaagccggcatctcccagccgaaaatgctgcggtcagtctgttcggaagcgaataatgtcagagaagctcctgcctgctcgtaagctgcccagaagaaaatgacgaagaaagctacgatatagattacgaaaatacggctacgttctactttggtcaatgaaccatccagcagaatgagcactggaaagacaatacaagccgtaaagatacccacactaatccagtcatcgctaaaggcatagctaaaaaaagctattaaggcaactgtaagggcagtaatgatgatgatattacgtactttggtacgtttgtccatcttcggatgtgaaatatgttcggctttatcctcctttttttcacgtctggcgtcggggacgataccaatcggttcaccggaaggagagaaaaggtatttattcttctgagtttcaaagaggacaacagtgaacagcgtcatgattccggatgcgaggaatccccatttaaagtcctgcggattccctgtgtctcccaagaaaccgcaaatcaaaggagcagcgaaagaacctacattaacacccatatagaaaatggtgtatgcagcatccaaccgtttgtccccgggttcatataattgcccgacgagcgaagaaacggtaggcttaaagcaaccgttacctaaaatcatgaatccgagcccgccatacatcagccagtgggcaaggtctgtattgttcagtgaagaggcactcataaacatcaggaactgaccgactgccatcatcaccgctccccaaaataccgaacgacggatgccccaatatttatcggcaatgtatccgccgatcaacggagtcagatagaccagtccggtgtagctaccgtagatagaggccgccgcttctttatcaaaaagcaatgcctgcgtcagaaagaggataaagatagcacgcataccgtagtaactgaaacgttctgccgtgctcgttgcgaaaattaggtaaaggcctttcgggtgccctttcaatgaactcatgaattatgtgtttagtagtttatggggtgcaaaggtactaaaaagtagattaaatgcctcaaaaaagaagattcttatggaatagaaaaatacaggatggcgtgcaagaagtctcagttacccaccttattatgttttcaacagtgtaaataatcaagtggatattctccttaaatgtgggtcagtccccatttatccaaaggtaaattcaacattctcaatactggcatagagcattccttctttttttctaagcaggattttgttttcccttgccagccaaccgatagcaatcgctacatcctcgaacgtcaaacctaactcatggcacaaagtgaacatagactgttcgcccttttcatttaagatgcgccatactttcccggcatttgagccaattcttttcttttccatcatgcaaactttagaagattaaacaatttatatttataatctaaacattgtgagcacaggagaataacgtaaagcacattactgcactacaaagatatcatttttctcgaaaaaagcaaataatcaaagcattagctgctattattagttacattctaatcatttatgccgatctctgctaaaaaatagcacaaataaagaaacagttcaattctttttcataagtttacagacgagaactaaactaatatcgcacatttaaaactttaattagcatgactaccaaaaaactaacaggaatactttcgttatttctttgtattatttgcctcgtgagctgtaatgacaatgatgacaacttttctccaatcactctggaatatgaagatcctcaaattaagttcgacaacgagagccgttcttacacactgactccgttcagcaaagaaacgacaccactcttcatcaagggtggagacggaacttacaaagtgaccaatgagaatgagaaagtggtacaagtaaactaccacaacggaagtttaacattgaaggcaaaggaaataggacgcgcatccatcaagatagaagacagttcgaataatatgtatatactgtctgtcgttgtaaaatatcgtactcttactcataaggcgtttacagcaaaagtcattgtgaagggagacgagcttacatctgaagaacacactgagttaatgaacaaagtgggcaattcatatccgattaataaatatgtatttacttttatgaatgcggaagacagcaaaggaacagtagatttgtattattcagataataacatgaaaacaggcaactttgaaaaagaacatatagtgctggatgaagaaaatgccattcccatcaaaggtgaatacaaattgagtgagtattaccgtataacaatcaaagaagataatggcaaagttattgatactttctatattaccaagaactttctaccactcctcaatacaagaatgaatgctcatccgttaattcagtactgttttgtcagagatttaaccgcacagtacaaacaagattaccttgcactggaaaatgcatatctgattcaaatagcagaatgagaactacactgattttcttctttagcagagtgaatagagtatttattatatgagcaaactccccattagatttagcaaaaaacaataagctattagctaatcaagaatatgcccatagcatatttatcacaatcacctcttccacccttttcctgaacctttgatgaataaggcgattgcgggtgaaagaggtgaaccagaggaatatacagtagtagaaacacgcatgggaaggttaacaaacagccatgaatgttctccggagagagtaaaagtaaatgagataacaatcattaatatctgacttctcaactattaataactgacacatcaactattaatacctgacaactcaagtattaatacctgaagttccttcccaaaaagccgaaaaccaaccggaataaaggattaattcagagtttttgtgtaagtttgtgcgtcgaaaactaaaagaatatcgcaatgaaaatatttccaagcagcagcattaagaagttagatgcctataccattgaacatgaaccgattgcatccatagatttaatggaacgtgccgcacaggcgctgactaaagccatcaccaacagatggaatccggaaacacctgtcaccatctttgccggaccgggcaataatggcggagacgccctcgccatcgcccgcatgatggcggaaaaaggatacaagatcgaagtatatctcttcaacacgaaaggcgaactttcgcccgactgtcagaccaacaaagaactggtagagatgatggaagaagtaactttccatgaaatcagcacccagttcgtaccgcccacactgacatcggagcatctcgtgatcgacggattattcggttccggactcaacaaaccattgagcggaggattcgctgccgttgtgaaatatatcaatgcctctcccgccatggtagtctccatcgacatcccttccggactgatgggagaagaaaatacattcaatgtaaaaagcaatattatccgtgcggacgtcactttcagcctgcaacttcctaaactggccttcctctttgccgaaaatacagaatttgttggcgaatgggagttattggacatccagctgagcgaagaaggaatcgaagagactgaaacaaactacgaaatgctggaaatcgaagaaatccgttcactgatcaaaccacgccaacaattcgcccataaaggaaacttcggacatgccctgctgatagccggctcaaaaggaatggcaggtgcatcggtactggccgcccgtgcctgtctgcgatcgggagtaggtctgctgacggtacacgcgccgttatgcaacaacgatattttgcaaacgtccgcccccgaagccatggtagaaacagatgtcagcgaaacatgctttgccgtacctaccgatacggacgattaccaagctgtcggcatcggtccgggactcggtcgcagcgaggaaacggaagccgccctgatagaacaactggaacattgtcagactccgacggtactggatgccgacgcactcaatattctggccaatcaccggcatacgctcacccatctgccgaaaggttccatcctcacccctcacccgaaagagctggaacgcctggtcggcaaatgtcaggactcatacgaacgactgatgaaagcctgcgaactggcgcacactgccaaagtacatatcattctgaagggagcttattccgccattatcacccccgaaggcaaatgttacttcaaccaggccggtaatcccggtatggcaacaggaggcagcggagatgtactgacaggagtaatccttgcactccttgcgcaaggctatcccgccgaagacgccgcaaagatcggtacttacattcacggattggccggagacatcgcccagaaaaaacagggcatgatcggattaatcgcaagtgatatcgtcacctgtctgccgacggcatggcgacttgtaagcgaataaaagttaagaacttacggtttattcaataacttcattaactttgtttttcaaaatcagctaaaaagaaccgaatatgaaaaagtttatcatagcaacaggactactaatggcaacttccgcctatgcgcagaccgaagtgctgacaggagtgacgcgaggaaaagactacggagtagtgtacgccctccccaaaacccagatagaaatagaaataaaagcaaacaaagtcaactataagccgggtgaattcagcaaatacgccgaccgctacctgagactgaccaacgtctctgccgaacccgaagaatactgggaactgaacagtgtcaaagtgaaacctgtaggtgtaccaaacagcgaagctacttatttcgtcaaactgaaagacaaaaccgtagctcctcttatggaactgactgaagagggtcttatcaaatcaatcaacgtcccctacagcagcaacaatgcaaagaatgcagcaaacaatgccgttgctccccaacgaaaagccaatccccgcgactttctcacagaagaaattctgatggcaagttccaccgccaagatggccgaattggtagcaaaggaaatctataatatccgcgaaagtaaaaacgcattattgcgcggacaagcagataatatgccttcggacggcgcacagctcaaaatcatgctcgacaacctgaatcttcaggaagaagccatgaccgagatgttttcgggagtccgcaataaagaagaaaagacatttactgtccgcctcactccggataaggaattcgacaatgaggtagctttccgcttttcaaagaagctaggtatagttgccaacaacgatttggcaggcactccattctacatcagtctgaaagacctgaaaacggtgaagattccgcaagaggacgggaaaaagaagaaagagatggaaggcattgcttataacgtaccgggacaggcaatggtgacgctgacggacggcaaaaagaaattgtatgaaggagaaatacctgttactcagttcggtatcatagaataccttgctccggtattattcaacaagaactcgaccatcaaagtttactttgatccggtgaccggtggactactgaaagtagatagagaagaaagcaaataaaacctctaaaaaaacaaaacgatgggtggcgaaggacatatgctcgacatgatacgtcggctgaaagacggcaaagaagcctcccgcttacgccgtgaacggagaaatgacaagttagggcgacttagaagaaacaacgacccttatcttctgccggatacgactccggaagagatggaacgcatcatcaaggattcggaaaagaaaaaagaaaaagataacagctatttcgtatggggaacgctcatcattatgggcgtactgataggatgtgctgtcctcctgtgggcaatcttttttaatggataattatccatttaataaatccgtctttctgtaattgggaaagataggtagatacacgagactcgtagcctgcttcatattgaaagtggtctgcgagtttttctataatctcacgaaccgtccgctgcccgtctatcaggttccatacagccgtaccgtgttcttccagacgcacatgaatatctttggacattcctttcggcaataaataacgactcatccacgaacgtttaaaacgagggaaggagagcacaatagtctccccttcctgttcagctttaatatgttcgttacgacaagggatcacctccaggaggtttattttctctttcgtagccatatcttttctcttttatatcttttcagatagaatatatactgtgattatttctgaatatttgcttcttccagtccgtagcctttcttcttgttttccactttcagcatcaaggcaacaatcagggcaagtacaccgaacatagcaaaaatagccatcggcaaggtataatcataagtctgtgcaccatctacaaccggacctttgcaataagagttcaacacccatccgatcagcaaaggcacgcccatcaatccccagttctgtacccaaaagatcaacgcataagccgttcccaactgtttctccggaataatcttcggaaccgaaggccacattgccgaaggaaccaatgagaaagcaaatcccagaataatcatgatcaccgttgcaaaccaccatatattcagaataggaagagcgaacatcgtgtgtacgaaaatcagcatcaccgacccgatcaccatcagcgtggctcccttaccgatacggtcatacaatgaaccgaacaacggtgtcaggatgatcgcgccaatcggcagcaatccgggaatcgttcccgcaagtttcggatcaacattgtacttctgtaccatcaaatcggccgcatacttgatgaaggggaatacagccgaatagaacaatacgcacagtaatgcgatcagccagaatcctttgttggtaatgatatagacaatgtctttcatgcggaaaggttcttccggttccagtccttccgcatccagtgaagcatccagtttcttatcgtagaaagtatagatgaagaatgcgatggtacctacgcacaacatgacgagacagaacagaatcggagcgggaatattggtatggaatacgccgctctcatccgtagacccgaagaagtctgccaaaggaacggtaagcaccatggccaaagtcgttccaatacgcgcggtcgccatttccagtcccatagcgagagccatctctttgcctttaaaccacttcacgataatcttcgaaacggtgatacccgcaatttcgactcctacaccgaaaatagcataacccaatgcagccaatgtgacttgcatcttgaatccgaaaagcatcgcaccttccgggaaagtagtagtaatagcataatatttcaatccacaaccgaacaccatcaataaacaggcacccattccggtgaagcgtactcccatcttatccagaatgataccaccaaagatgagcatcagcaggaatacattaaaccagccataagcactggtgaaaaaaccgtaatctaaactgtcccagagaagttctttttcaagcatgggtttcagaggagacataacgtctgtgaggaagtagccgcacaacatggtaaaagcgactaatgctagaacactccaacgcagcactgcggagtcattcagcttttgtttcaattgttctgtcattgtaatatttaaaaggagttaataatctcgtaacgggcaacaaagttaactaattatcatttgttttactaaaaaaggagaacattttataagaaaaaggacatctgaccggatattcctgtatgaagaagagcagaccgggcccaataataaagacaggcgcgaactacacgtattacacgattctattagaatctcttgtaattcgcgtaattcgcgcctataatgaagagaacgggtcaaaaagcccgttcactcaataagtttaaaccgaatatcctgtcactgaattattctgctgcaggagcaggagtttcagtagccggagcttccgttgctggtgcagactctgcaggagcagtagcatctgtctgaggagcagcagtaccggtaggcatattatacgggttggtttgttgttctttctgtgcttgttccaacaatacatctttagctgcagaagaagaaggaacaacgtaagcagtagcaacgctcatcacaaccatgaagatagccagaccccaagttgctttttccagaaaatctgtagtcttgcgcacgcccatgatagcgtttgatgaagaaaaaccagaagcaagtccgcctccttttgaattctgaatcagcacgatgaagcacatcagcaaggctgcaatcaccattaagataatgaataataagtacatttttagttattttgaattagcgttaataatcaatttctccaaaaatctgatttggtctgcaaagtaagcatttttttttggatatttcaagcttaattttttaattatttcaagagctttcgaatatcgttgctgttttacgtagattttggccaaagtttctgtgaaacagctgtcatcttcctcttctatggtgttggtttcagttgtttcgtctgttctgcccgtttcgtttgtttcagcggaagaagctgcctttgctttctcttcttccctcaaaggtttcaggtatacgactggatcagtctcgcttttttcgataaagttgtcaatcagctcgtgtcctttcagcttgggcattgcctctgccggctcgtcggcgacaagtgtctcttcgagaaggtatgccgtatagtccatggagtaatcaaagcttgtctgactggttacttcttcgggagccgtcgaaagaaaagcatcgatcagagccagtgtccggtcgacggtaggctcatctttcaatacttcagagagaggcaaccctttcttctgggattcgacagcgaagcgttcgccttcgatcagatgaaacagtttccgtcggtcggcaatatacagaacggctttccgcagttccgcaccgaaattaatgtcgtggagaatatacaggttcttgagatacaacaaccggagcgactgaaaatacggatacctcgcgagctggttgcgcagttcgtacaaagtatccctattcagcgtctcgggatgctgaatccattgttgcaagttaacagaagtcattaaattaccagtttgctacagttgcattaaatatttggtcggttatctctttactcatttccgctattaatccatcctgtacggctgtcagcagctggctggaatcataggtacggaaagctgagaattgttgttcgaagtcttcggcgtgatttgtgttgttgacaaagcgtacattgaccgtgatggtcagcttcgtttccgaagagtaaccatcggcagacactgcctggttatactggttgtagcccgtaatttcaccgtcaatctgcagatccgcattctggttcggtttcagcagttgcagacgggtctgtctgatgaagatatctttcaggtcttcattgaacttggtagccagcggagcatacacatactccgacttaatcgggaaatcagcaatcgaaatagtcttcaccttatcgtaattgatagaggagccattaaacttataggacacactacaggcgatgatgactgccggtaaaacaaccaatatcagcggtcgtgctattttcttaatccaattcatattcttttatttttctgtaaagggtacgctcggagatattcagatccttcgccgcacttttccgcttaccatgatgcctctcaagcgctttacgtatcatttctttttccacttcatcgagcgaaagggtttcttccacatactcttccgtgtcctgaatatcgtcatcgtcttctttgggacaaacagacggttgctgcacagcatggattatggccggcacggaaggttggtgcgtcgttgtcactaccggagtagctactacctgtcccatctgtccgacttgtcccgcacgttcggccatcatattgtgcaccatcttcttcagttccgccacttcctggcgcatatcgaacaagacagaatatagtatttcgcgttcgctctcaaagctcttgctctcgcgtgtgccgaacagtgccggaaggcgttgggtattctgtgccggaagataggtctgcagaatcgcagccgttatctcacggtttgtttctataatcgaaatctgctctgtgatgttcttcaactgccggacgtttcccggccacggataagcaagcaatatcttcttggcatcttccgtcagctggatagccggcatccggtacttttcggcaaagtctgcggcaaacttacggaacagcaacagcacatcgtctccgcgctcacgcaaaggtggtatctgaataggcaccgtgttcaaccgataatacaaatcttcccgaaagcgtccttcggcaatggcttgtgtcaggttcacgttggtagctgccacaatacgtacatccgtcttttgcactttggatgaaccgaccttgataaattcaccgctttcaagtacacggagcagacgcgcctgtgtaggcaacggcaactctcccacttcatcaaggaagatggttccaccgtcagcttctccaaaatatcctttccgctcaccaatagcaccggtaaatgctcctttctcgtgtccgaacagttcggaatcgatcgtaccttccggtatggcaccacagttgacagcaatatactgcccatgctttctccggctatattgatgaatgatctgtggaaaactttcttttccgacaccactttctccggtaatcagcacagacaaatcggtaggcgctacctgaatggcaacatctatggcacgtgataaagcctcggtattgccaataataccgaaacgctgtttcacttgttgtatctccgctttggtcatctatcttaatattaagtaataggtaataagtattaagtaataagtattaagtattaccatcattatcatctcgcttccatccgcatggctaatacttaatacttattacttaatacctattacttaatcttcgtctactgtatccagttttagtttatcactatcgtcccgtttctcgtaatactgcttccgcaacgggtttacccgtgccgctttctcgcgctggcggttgcggaatacatcaatcgctacataaatagcctggcggaaagagtcttcgctggccagtcctttaccggcgatgtcataggctgttccatgagccggagaggtacgtacaaccggcagtccggcggtatagttcacaccgtcttccatagccagggctttgaacggagccagtccctgatcatgatacatagcaaggattccgtcaaagtgagtataattgcccgaacccataaaaccgtccgcagcataaggaccgtaacagatgatccctttctcttccatttctttcatggcagggataatgatttcctgttcttccatacccagcagtccgccgtctcctgcatgaggattcagtgaaagcactgcaatacggggcgcaccgataccgaaatcctgtttcagacaacgatggaaaatcatcagcttttcctgaatcagttccttggtgattgttgtagcaatctcccttaccggaatatgcgtcgttactaaagccacacgaaaatcgtttttcatcaggatcatcagtgacttgtttccattgcccagacgttcttcaatatactccgtatgcccggggaaagagaactcttccgactgaatggtatgtttgttgatcggagctgtcacaatgacgtcgatcagcccctcacgatactcttctatggcacgctccaaagcacccaatgcagccttacctgcttcgggatcgggtttggagaattccactttcacttcgtcatctgtacagttcactacactcagacggttgtatccggcttcggaagctgtgttgacaatgctgaaattagcctgtacatccagtgctttacgatggtaagccgctactttaggtgaaccgtagataatcggagtacatagctcaagcatggtagggtctgagaatgtcttcaagatcacttcataacctaccccgttgatatctccttgggtaatgccgattcttattttgttttcttccatgtttttatttattagttggttccgcttctctggttacccccagtggaatctgactctgctgaccttcttgcggaagtttcagcgtataaagagatgcttccatctggcgaaccagattgcgtttcattttatcgggtgaatatacaaatatttctgctgtaataatacgttggttcttctgatccagacgagtatgggaaacgaatgggccacccatgaagtcacccttcatgcgccacaatccacgagcttccatcgtgtagtcattgtgcacgttgatcggacgaacatcggtcagtaacgagtctgtcgacatatatacgccttctttatatccggggatattggctttcatcacagaatcgcgcttatgaacaaagtattctttggtgaatgtatccttgtcagtataaggataagaatacatcacgaaattgcgatccgcgctgcctgtattggtagatgcccaaaagaagtcctctcctgtcttggagttattcagttcggaaggtatccagatatcgcagtcaaacagactatctaccttatttgagataaagttgttgtgcttttcctccagcaaagtaatctgacggttcatttcagcgcgagtgaagaagtcgataatcgtctgcttgttttcttcgacaaacttctcaaacacttcttcgttcggagcctgaatggtcagtatcatctgtggagaagcataaacgtctttcgcatacttgaaagtacctttggtataaatatcttttatatctactatcacaatattacggatcaacttcagcgtagaatcatagtccttcggtgaagtatacataatccggaaagaaggttccgactggggcagtcccggcatgtcagaatcaagcacatcatgcaaggcccttccggcggcacggtcccacactcccgcatctactacaaccaacagttcatacggacgaccgctagaggtatgattcccctttaatccacaagaagcaactacgaaggctaccagagccatgcttaaataaaaaaagtactttttcatgatgttcgatttttatattaacttttattattttcctcctgtttcgcagtcgacagcataccgcatgccgcaaaaatatcctctccccgcgaagcacgaatggtagtgaaaagcccgtgcgtagtcagatagtcacggaaacgggtcatcatatccatatcggctccttcaagggctactcccggaatagaatggaaacggatcaagttaatccggcaatccagtccgcgaagcagtttgagtaactccttggcataaacttgcgaatcattaagccccttaaaaacaatatattcaaacgaaagtcgacgctgtttgctaaaatcatagttttttaacagttccaccatttccgtgatagaaaaggctttctccgccggcatcagttccgcacgctgggcggtcaccggagaatgcaggctgatggcaaggtgacagtcgctttcttcgataaagcgccgcaatcctttccgcaatccgacagttgaaacggtaatccgcttcgggctccatgcataaccataggaccctgtcagtatgtccaatgccttcaacacctcttccagattatcgagcggttcgcccattcccatcatgacgacattcgtcagtttgtcccgttccggcaaggagtgaatctgattgataatctgatgggcggtcaggttggcagagtagccttgtttcccggtcatacagaacttgcagttcattttgcagcctacctgcgaagaaatgcataaagtcgcccgttcatcatccggaatatacaccgactccacaaaatgattctcgcccacagggtacaggtatttcaccgtaccgtctacagagcgcatttcctccaccggagcttcagctcctacctcatagttctgcttcagtaactcccggtatttcaacgacaagttagtcatttcatcaatcgaagtcaccttcttatcataaagccaggatgcaatctgtttggctgcaaagcccggcattcccagacgtttcaccagtgactgcagctctataagcgtcattcctaagaggggatatttagacatcattctttctgttcatggtttatatttgcaaatgtaaggaaataaagtcgatttccgtatagcaaggatgtaaaagttagcaaaaaaggtcgttccaaagcatggaacgaccttttgcagttatcgtttttacgactaatcttagaagaacaggtaacgtgtatccttcacttttcctttcagatacagatcgttcatcagacggcttgcgaagcgtgcgtgcatattagccaatgtagcttcttcatctttagcgttaaaagtatcgctcagtttgtctttgccatacatctgaagcacaaatacaccggcattacctttgattggagcactcagtttgttcatttcagccacagaagcataagcacctaccagcggttcgctgctgcgcaattcagagacataagcgggagcggcaaatgtaaccagcttcaaagaatcgctgactgcgccgggcatagccttgtactggtcgagagaagttgcattggcagctttcatatcagccatgatcttttcggctttcttatctttaacgatttcagctctcaactgatcctgtacagctttcagcggacgatatccttccggagtaacaccaaccagagctactgcaaccatatggtcgctttcgccacattcatacaaaccggaaacatcacccggtttagcggcaaatgcccatctcaatgcttctttagtacctcttacaccaccgatagtgtgttctgagctatacaagtctcttctgtcaagcagtttgtatccggcttcttcagcgttagcgatcatcttttcagcagtaggattggcagcgatgaactggctgaagtcattgtaagcacggttataagtttctttactgaattcaacttcacgtttcacaacagctactttatatttatccttcacagctttcttgttagtcacctgcaggattacattagcttgtcccaacggcaggtttactacttcgttcacgcctgtattattgatagcagagataaacttcaggttgtcaccatcgatctgtgcgccttcatactgtgcagagctcatccagttagtctcacccgtctgaccgtatttcttagccagatctgcgaagttagcaccgcctttgatagcagtatagatactgtccgccaaggcttttgtcttcaaagcgtcttctgcaaacacctgaatctgacggaactcgattgagtcggcagcagctgtttttgcaaccactttgaatgaattaatagtattgtcggcaccattatagtacggaccataaacagaaccaacggatgcagagtccagacgggcaactacatctgacgggaaagctgttttattatagaacaagtctacataaggagcttccgaacctacagaacggatgaaagaagtataatcatctgttgtagtagccagctgtgcagtagcttcgtctacttcctgctggatagcagctctgtcttccgcacttgcagtcacctgaacatcaatgtacttgatatcacggctttcctgatattgcttgaactgttctttcttcttgttataaaggtctttcagttccgattctttcacaacgattgtagaatctactacagaagaataaggaacggcagccatcaacaagtcatattgattcactcttgcgtcgaaagcgtcctgtgcttctaccgggttagagagaagcgcttttgctaccaatgcctgatatttttctgccaggcggctctgaaccaatgtcttctggatgaatgaccagtatttgtacatgttgttgtactgttctgcatactgagccggcatctgagattcgttcattttagcgtaatctaccagaaacttattcagcatatccttatcgaaagcaccggtctgcgggttgcggaaaggagtctgttgcaacaacggatgcacgcctgctttcaggatatcctgaatttcagcagcagagactgtcagtcccaatgcttttgcttctttctcaaccagtttgttattaacgtaggaacgccatacttcgtcgcgcacctgattggtctgttcgtcgttcagtgcagtcactccgcgggaaagctttatcacttcggtatattcttctaccagattctgatactcttgagcggaaagagcatctccgttcacctcacctacgtcatgtgcctggtgcggttgcatcaccttccacgcgtcacccgcgatgaaagcaaacagcgccaaaccgataacaatcaccaatagaggtcctttcgacctaatgttttgtaatgttgccattttgattaatacgatttatgtttattattatttctttctattgtcattttagcgcacgaagatacaaaaaatgctaatatgcttctatttattagctaaaaatttcacggttatcgccattattccatgacttttaagcgtacaagttctatttttgtcgctgtcaccttgattattttaaactgataacggccgacacgtaccaattcgtgcagtttcgggaagctctgatattggttcagtatcaatccgcctactgtcagatagtcgtccgattcgggcagatcaagtccgaacatttcattgactttttctatctccagacgagcggacaaaacatattcatcttcgtcaatcttcttgcagatataggaagtattgtcatgttcatcttctatatcaccaaatatttcttctaccaagtcttccaacgacacaatgccggatgtacctccaaactcatccactaccacggcaatcgtcctcttttgcaacataaacagcttcatcagtttgtgggcagacatcgtttcgggtacgatcggcacgtctttcacgttatcgcgccagtctttcggatcacgaaacatttccgatgaatggataaaaccgaccacattatcgatatttccgtcatacacaatgatcttcgagatcccggattctataaaacggctcttgagttcatccaacgaagtagtaaggtcgaccgcaacgacttcggtacgtggaacgatacagtcacgtatttttatgtttgagaaatcaagtgcattttgaaagattttcacttccgtatccaattcttcttcattcgcagcattatcgatgctactctgcacgaaatagtccagatcgacttttccgaaagccttgtccgaagcatctttgttaaccttcataccgaatatacgaagaaaaaggcaagacaaaccggaagataacttcgagacaggatataaaatgacataacaaataaaaagcggaatagcggcaacattcaagaccagattgggattgatcttaaacaatgttttaggaagaaactctccagtcaccaaaataatcagagtagagatgacggtctgcgccaacaccatcagaaagtggttatcaataaaaccagccaacagattatcaccgatgatctgtgccatcaatataccatagataaccaatgctatattgtttcctaccagcatggtagagataaattcgttcgagttcttgaaaaagatggaaagaatacgggatgtgattcctcccttacgttccatttcaaagcgcaacttatctactgagacaaacgcgatctccattcctgagaagaaagcggagaaagccatagtgatgagtaaagagatataaatattcatagtttatttcacagaatcttttttcgtcgaatccggcggcaatgcttttacttccgattgagcagttcccccattttcgtcaacatagaaaatgccctcaatattctgaatgacataaacggtcatatcttgatttgactcaaaaccatgcccggtaatgactcggtccggctgttggatacgtataaatttatcagaataaactttcttggttgcttggttccaaaagagcaactcggtattaaaacgttctcctttccggttctgtatatcaacattccctattagcttccaaagttgttgtttatcataaaagtaggcagtatctgctttgatgctggcttcaatattaaagattgagtcgaactgttccaaataaactcctttttcaaaagcccaataagaaggcttcttacgatcgaacatcaaccattcttccgtcttcacccgataacgtgtcactcccgaatcagaaataagggttgtaactcccaacgttttcatcattggtaatgagtcacgctcagtaatagcatcacctacagtcttcttcttaccgccgcaggaagaaaatgaaagaagcataacaattgccccgaaggcaattgttatgcttatgcttttatgcaacaaacggttacttcgttttcgcaacataaattttatctaatcgttgtagtctctccgatccagccaccgatagtgatgcggtcgccttgtttgtaacctaacataaataggtctttagcctgtggagtatgaccggaatatgtaccaatcaacttgtttgcttcttcagccacacttgggtcaacagcttttgcacgttgcagtttatcaattacagcgaagtaagtacacttattcaatgcagactcatcactccagttaggactcattgcatacaagttagcaatcaggatataaggagcaccatagttctcgttgaagctaattgctttctgacagtatgatctggcttgagacaatttcttagcagaagccaatacagctgcagcagcatatgccttttctgctttcttcacgttgtcagtttccaattggattgcttcgtcaaagaacttcacagcaccatcaatatcacctttcttgaatgcctgataagcacatcctgtagcagcttcagctgttggctctatcttataagcgtagaaagatgcttgcagataagcttcgctttctgtacatctcatcattttcatgatatcgattacttttttcagataagccaagtctgtctggttagcttctactttcggaccataaataccctgcagagattcgcagtcagcagtaccactgtttacgaacaaagccacgaggttatctttgatacccataaagtttttcttttttgcttcattagtttctgcagcaatagcagcgtcagcatattctgaagcaagcagataatcctgaataaattgttctttatgattaggatcagctttcagtttatccaatgacatctgaaggaaataaaaaagcgtagcagctgccgattcgcctttcactgcatttacagactggctcagccattgataggcttggttagcgtctactttcggagccaaagcaatatagtctacagccttgatacccagtgcttcgtcagcagaagacactttagttccttttgcaaggaattcttctgtgtatttcatacgcaaatcatgcgtattcatcaattcatcaaaatacttctgatattcaggattatttttatccttaatctgagccatcaagcctttaaggattttatatccgtcagtaaaagtgtaaaaacggagtgtgggacaattttccaacacagctttccaaggagtatacgcatctttaaaatttcctgcacgcacagcttcatgcgagatactactgtttgaattacagttagtcgcatcctgtgctaccacagtggttgctccagccgaaaggaacaacatagccacaagcgttttaattttcattgtatctaaattttagttgtttatataatatcgtctattctctctctctcacttttattactctaccctgcgcttgaagaaccaacgttcgttgaacgtaagcccgatactcacgcggaagatattttcattcaccatgttcgtctccagtccttttacgcgaacaaactgtccactgatactaagtatggaacgcgaacggggaacaggcagaccgaaaccggcagttacaccatattcacgtgaagcctttttcccatcaatcttataatacggtgtcgtataataagctcctaaacggtattttatgtgggcgaaataggaacgtcctatcaaattaggaatgtattccgcacctactgatatttttgtacgatcacaataagtgaaagtttcattaaagtcctgacgtacatcttcgtcagtcgttgctacaccaaaattagtttttgaccattgctgtaagctataatctgcaccaaccgtcaaacgcttgtcatagttatatgtaaatccgactccaaaggtattgggtaattcgaacgtagcgtcctgtgcattcttatattcagttccataattcgtgttggctcccatgattacaattgacgtataatcattattcaacttatgtttaggagaatatacagcaccaatcgtcaaagaactctttttattcaaagcctgtgtatactgtgcaccgaaatccaatttataatcagaaatcgaggttaccatttttcgctgataggaatcataagaagatgttcccggatagaacattcctcttgtacgggttatatctccccaaaaataagatgcattcacaccgacagagagattcttaagtacttttacaccagcaccaacgtacatttgatgcaaaccaccgtcaccggtaaaacttctgctatatgccaaaccattgtccgtagtctgactatcagacaccgtataccccacattagaatatggcaacaatccgacactcatcgccatccacggagccaaccggaactgcatagcgagataatcgaaactggcgtttttggcattcaacttcaggccaccaccactaatattcatattctgtaaactgacacccccttcgaacaggaacgtcaacgaatcaatggccgtataggaagcaggattcgttggattgatctgtgctccatccctgagtccgaaagcaattccacccatcgccttgctatttccgaaactttgatcggacaagtcgccatagccatatcgtgtgtaaggagagtttgtattattttgagcgattgccgttccggtaaccatcatgagcaaaagcgcccaaatcgtgtgtttaaatcctaccattattatagtttaaaattctatttaatcctttcaacactaaaaatctatctgcaaagatggcactttttacgctgctatcaaaagaaaagtcatctccgcccgttaaaaaaaccaaaagttcaggatatttatgcttcatagcctcaatataacctgaaatttcatattccattcctttcagcacccctgcacggatggcagtttccgtatcccttcccatcggcagtttgcgcccgttggagtctatcagcggcaagcgtccggtaaactggtgaagcgctttatagcgcatctgcatgccgggagaaatattaccgccatgatattgtcctttcgagtcaataaactcataagtgatgcaagtgcccgcatcaatgaccaagatgtcattatgaggaaactgctcgttggcacccactacggcagctatccggtcgtatcccaatgtctcgggagtttcgtatagattacctaccggcagcggagtctcatggttgagccataacagagggaacggcaaagcagccagttcggcaagtatccgttcgttcaaatcgacgacagtagctacaatcccccgctcaatccggtatttggagcaaagagcctccaagctatccaatgattgattggattcggtcaacacctccaccatctcacttccattgaagagggcaactttcgctgtcgtatttcctatgtcgataattaagttcaatacttttcgtctttagcggcgcaaaggtaaagtaaaaaaagaaaagttgaagcatacaggaggaattatcttcttttttcatttcaaatatcgtcccaaacgccaaaatcgaactatatatttttaaatatataatttattagttatcccttattatggtaccgctttgcgtttcatagttatttttccttacacaatatttccctatatatcaatcagttacaagagtttcaaagtgttccgttcagcgttccacattttataagaaaaaaagaacgcttttagaggccctatttaccctaatcagagcctctgtttgggtgaaacgaagcctctgtttgggtaaaacaaagcctctgtttgggtaaaacaaagcctctgtttggataaaacgaagcctccgtttctacaatccaactattcttcgtatattcgccaccaaaataataaacgggcatttctgatgaaacggacaattctatatccattactgactctttatctgcttatcttttcaaacggacaagccatagcttctgacaacgactccatccgcctcagcctgctgacttgcgcccccggtgaagaaatatactccctgttcggacatacagccatccgctacgaagatccggccaacggaatagatgccgtattcaactatggactattcagcttcaatactcccaacttcatcctccgtttttcactcggtgagacagactaccagctaggagctaccgactacgcccgtttcgcggcggaatatgccttcgacgggcgcagcgtctggcaacagacactcaacctgagcaaagaagaaaaagcggaactcatccgactactgcaagaaaactatcttcccgaaaacagagtttaccggtataatttcttttatgacaactgcgctacacgcccgcgcgataaaatagaagaaagcattgacggaaaggtaatatatcccgcagagccgcaagacggttcgctatctttccgcgatatcgtacatcaatactgcaaagggcatccgtgggcccgcttcggcatcgacctctgcatcggcagcgaagcagaccgccccatcacgcaacgccaaatgatgtttgcccccttttacctgatggatgctttcgcaggcgcccaaatcgtccatgattcggttcagcgtccgctcgtatccggcaaggagctgatcgtagacgcccttcccgaggaagaagaaggcggttggatgcccaccccgttccaatgttccctcctgctttttatacttaccgctgctgctactatctacagcatccgcaaaaggacaggactctggggtgtcgaccttattttattcggtgccgcaggcatcgtgggctgtgtgctggccttcctcgccctattctccgaacatccggctgtcagctccaatttcttattgctggtattccatccgggacagcttctgctccttccatacatcatttattgtgtccgaaaaggaaagaaatgctggtatttgacgctgaatttagtcgttttaacactttttatggtgctttttccgctaattccgcagagatttgacttagctgttgtacctttggcactctgtttgctgatacgttcagcgagcaatttgatattgacctctaaaaagaaataatgaaaggactactaacttccctgattaccgtactgaccttcaccgggctacaagctcagtcgttgcctactgcccctaaacttgtggtaggactcacgattgaccagttgcgtacggactatctggaagctttttcgtcgctctacggcgagagaggcttcaaacgcctttggaaagagggaagagtattccataatgcagaatatacattcagcggtgtagaccgtgcctctgccatggcagccatctacagcggatcaacgccttccgtcaacgggatcatttccaaccgatggatggatgtagccaccctacgccctgtcaacagtacggacgacgcggccttcatgggttattacaccgaccagacctgcgcccctaccaaattattaacctctaccattgccgacgaactgaaaatagcgacacaaggcaaaggtatcgtatacgccatcgcccctttctgcgacgcagccattttcgctgccggacatgcaggaaacggagcgttctggatcaatcccacgaccggaaaatggagcggaacgacttattatggcgaattcccctggtgggcaagccaatataacgaccgtcaggccatcgactcccgcatctccagcgtcacatgggaaccggttttcccacgtggtatgtacactttcctgccagattggcgggacgtagtgttcaaatataaatttgacgacgaccgcaacaataagttccgccgtttcatcaccagcccgttcgtcaacgatgaagtaaatgccctcgcagaagaagcaatcggcaaaggttcggtcggcatggatgacattactgacttattggcacttacttattatgcaggcaactatgcgcacaagtccgtacaagagtgtgccatggaaatacaggacacttatgtacgcctcgaccgcagcatcgccaacctgcttgacctgctcgacaagaaagtaggcttgcagaatgtgcttatcttcgtcacttccaccggatatacggacagcgaatcgacggattcgggactgtacaaaataccgaccggagagtttcacctcaaccgctgcaccgccttgctgaacatgtttctgatggccacttacggtgaaggaaaatatgtagaagcctatcacgaccagcaaatctatctgaaccacaagttactggaacaaaagcaactgaacctgacagaagtgcaggaaaagtctgccgacttcctgatgcagttcagcggagtaaatgaggcatattccgcccaccgacttctcctgggttcatggactccggaaatatacagaatacgcaacggctatcaccgcaagcgttccggcgacctcgtgatcgacgtgttgccgggatggactatcgtcagcgaaaacggcaacgagaacaaggtggtacgtcattcctatatccccgcaccgctgatcttcatgggtcactccgtgaaaccggccatcattcagacacctgtaacaatcgaccatattgcgcctacactggctcatttcatgcgcatacgggctcccaatgcttcttcttcggctcctattaccgatcttcggtaaaagattcctcacaaaaaccatgcgaaaaacataaataaatcagcattttaatgtaactttgcgcggatttatatatggaaaaagcaccgtgcagacaatcaagaaataataataaactaaataatacaacatgggatttaatgaatttttaagctcgattttcggaaacaaatccacacgagacatgaaagaaatcaaaccctgggtagaaaagatcaaagctgcctacccggagattgaagcactggacaacgatgccctccgtgccaaaacggaagaactcaaaaaatacatccgcgaatcggctactgacgaacgcgctaaagtggaagaacttaaagcgagcatcgaaagcaccgaactggaagaccgcgaagaagtctttgcacaaatagataagatagagaaagaaattctcgaaaaatacgagaaagcactggaagaagtattgcccgtagctttctctatcgtcaaagcaactgccaaacgatttacggaaaacgaagaaatcgtagtaaccgcgactgaattcgaccgccatctggctgccaccaaagactttgtacgcattgaaggcgacaaggccatctaccagaaccactggaatgccggcggcaatgatacggtatggaacatgattcattacgacgttcagctgttcggtggtgtcgttctgcacaaaggtaagattgcggaaatggcaaccggtgaaggtaaaactctcgttgctacccttccggtattcctgaacgcgctgaccggaaacggtgtgcatgtagtaaccgtgaacgactaccttgccaaacgtgactccgaatggatgggcccgctttatatgttccacggtttgagcgtagattgcatcgaccgccatcagccgaactccgacgcccgtcgtcaggcataccttgccgacatcacgttcggtaccaacaatgaattcggtttcgactacctgcgtgacaacatggctatcagcccgaaagaccttgttcaacgccagcacaactacgccatcgtcgatgaggttgactcggtattgattgacgatgcccgtactccgctgattatttccggtccggtgccgaaaggcgacgaccaactgttcgaacagctccgtccgctggtagaacgtctggtagaagctcaaaaagtattggcaaccaaatacctttccgaagccaaacggctgattgcctccaacgacaagaaggaagtggaagaaggattccttgccctttatcgtagccacaagtgtcttccgaagaataaggcattgatcaagttcctcagtgaacagggtatcaaagccggcatgctgaagaccgaagaaatctacatggagcagaacaacaagcgtatgcacgaagtgaccgaaccgttgtacttcgtcatcgaagaaaaactgaacagcgtagacctcacagataaaggtatcgacctgatcaccggtaactccgaagacccgacattgttcgttctgccggatatcgccgcacaactctccgaactggaaaatcaaaacctgaccaacgaacaactgctggaaaagaaagatgagctgctgactaactacgccatcaaatcggagcgcgtacacaccatcaaccagttgctgaaggcttacaccatgttcgagaaagatgacgaatatgttgtgatcgacggacaggtgaagattgtagacgagcagaccggacgtatcatggaaggccgccgctactctgacggattgcaccaggctatcgaagcgaaggaacgtgtgaaagtagaagccgcaacgcagacattcgcaacgatcactttgcagaactacttccgtatgtatcacaagctgtccggtatgaccggtactgccgaaacggaagcaggcgaactttgggacatctacaaattggatgtagtcgttatcccgactaaccgcccgatcgcaaggaaggatatgaacgaccgcgtttacaaaaccaaacgcgaaaagtataaagccgttatcgaagaaatcgaaaaactagtgcaggcaggacgtccggtactggtaggtacgacttcggtagaaatctccgaaatgctgagcaaaatgcttaccatgcgtaagatcgaacacagcgtactgaatgcgaagttgcaccagaaagaagctgaaattgttgcaaaagccggtttcagctgtgcagtgaccatcgctaccaacatggcaggtcgtggtaccgacatcaagctgagcccggaagtaaaagccgcaggcggtttggccatcatcggtacggaacgtcacgaatcccgtcgtgtagaccgccagttgcgtggtcgtgcaggacgtcagggtgacccgggttcttctgtattcttcgtgtcactggaagatgacttgatgcgtctgttctcttccgaccgtattgccagtgtaatggacaaactcggtttccaggaaggcgaaatgatcgagcacaagatgatctccaactctatcgagcgtgcacagaagaaggtggaagaaaacaacttcggtatccgtaaacgtctgttggaatatgacgacgtgatgaacaagcaacgtactgttgtttataccaaacgccgccacgccctgatgggtgaacgtatcggtatggatatcgttaatatgatctgggaccgttgcgcgaatgcgatcgagaacaatgactacgaaggctgtcagatggaactgctccagacattggcaatggaaactccgttcaccgaagaagaattccgtaatgaaaagaaggacacattggcagaaaagacattcaacattgccatggaaaacttcaaacgcaaaacggaacgcctggcacaaatcgctaatccggtcatcaaacaagtatacgaaaaccagggacatatgtacgaaaacattctgattcctatcacagacggaaaacggatgtataacatctcctgcaatctgaaagcggcttacgagtccgaatcaaaagaggtggtgaaagcattcgaaaagtctatcctgctgcacgttatcgacgaagcatggaaagaaaacctgcgtgagctggatgagttgaagcactctgttcagaacgcaagctacgaacagaaagacccgctgttgatctacaaactggaatccgtaacactgtttgacgctatggtgaacaagatcaataaccagactatctccattctgatgcgcggacagatccctgtacaggaagctccggcagacgaacaacagccacgccgcgtagaagtacgccaggctgctcccgagcaacgtcaggatatgagcaagtatcgtgaacagaaacaagacctcagtgatccgaaccagcaggctgctgccagtcaggatactcgcgagcaacaaaaacgcgaaccgatccgtgcggaaaagacggtaggacgcaatgatccttgcccatgcggaagcggtaagaaatataaaaactgccacggacagaatgcttaacagcagtccgatgtaagattataatctaaaagaaagcctcaaacggttaaaaactgtttgaggctttcttttattcatccaaaatagtacttttgcttaaactactaaagatatcaagactatggcaaaattctattcactggcatttgtttctctgctactgttggcactcggcagctgtcagagcctggagcagatttctattgactatatgcagcccggagatatgactttcccttctcaactccgtaaagtggctatcgtgaataacaccagcaccgaaccggataacaagctgatcacacagaccgaaaagccgaaagaaaacgtacccgaaataagccacgccacagcgtatgccaatggtaatgttaagattgcagcagaatcactggcggaagaaatagcgcatcagaactatttcgatgtagtggtgatctgtgattccgctttacgggccaatgacaagtttcctcgtgaaagtacactgagtcaggaggaagtccaacagctgacatcagacttgggagtggactgtatcatcgcaatggaaaacctgcaattcaaagcgaccaaaacggttcgttatatccgtgattttaactgctacctggggacagtggatgtaaaagcctacccgacggtgaaggtatacctgccctcgcgcagcaaaccgatgactacgctacaccccaccgacagtatcttttgggaagaatacggaggatcggtaacagaaacatttgcacacatgatacctgatgcacagatgttacgggaagcttctgaatttgcagggactatccctgtcaaacagttactccctttctggaagacaggcaaacgatacttgtacaccggtggctccgtacaaatgcgtgacgcggcaatctttgtccgtgaaaattcatgggacagagctttcgaactttgggaacaagtgtacaacggaaccaagaaggaaaagaaaaagatgaaagctgccctcaatatcgctgtttattatgagatgaaagacagcttggcaaaagcagaagaatgggcagtcaaagcacagcaacttgcccaaaaagtagataagaaaaacattcccgaaaatgcggcgtacgccaccattgacgatgtaccgaattactaccttacaaccctttatgcaaatgaattaaaggaacgtaacagtcaattgcccaagctaaaaatgcaaatggagcgatttaatgatgatttttaaggaaatcatgcattgattattattttttttatacctttgaggtaacaaaaaggaagaacctatgaaactgagccaacaatctctgtctaccatcgaatcggctatccaaaaggcagccggcaaatatgtatgtggctgcgaccagacagccgtaacagatattcatttacaaccggaccaaacatcgggacaactcactatttataacgacgatgacgaggaattggctaatgtaatgattgaagagtgggcaacttacgatggagatgatttcatggaaaatgtagagcccaacctgaaaagtatcctttgcagaatgaaagatgcaggagacttcgataaagtaacaatattaaagccttattcattcgtactggtagatgaagataaggaaacagttgcagaattgttgctgatagatgacgatacattgcttgtggatgacgaactgctgaaaggactggataaagaactggacgagtttctgaaaaatttgttggagaaataaatatgttcgattgcccggcatggccttgctgaagcaattatcatttataaaaagaataatcggaagtaaaaggtattcccctgtttacttccgattattcttttttcgttttatatgattcgtacaaacccaagtttccctatcgacttttagtcactcccgtttaaggcagcactaccgactttttagtcagccctctagctgaaagccggagcagtgtaggtagataaattactttgcttcaatcgctgtccgataaacagattttgccgtttcaattacattttgtaacttatgatctgatgaatcagctgttttgtttttctccgcccatgctttctccatgccatagaaattaatcggttcttccgctgattcaccaagtttgccgtccaactcccgttgtttctgctcaaagaaagttttccaacgttgataatacaagtctttcaaaatcccgctccactcccgatgggaataatcatgcagacctccctgattagcagctatactgtctccccaaaccgtgatcagcgcagaagcattccattcgtaaagtttcttttcttcttccgtggttcccaaagaacgtgcggcattcagccatgaagacgccgagaactcctttcgggtggacagcaaactgtcctgagctaatattaactccagaaactgttgtgtctgtttcccgaagctatccttatctttccgatcataactctgagaaatttcttcaagcagcacattccccttatctgccaggctctgacgcaccacgtccaccaaatcatattcaaagttattatttcccttgtactgatctgcaacagaaagtaacaagcgggctgcctttgccgttgaatcaggtgaatagaataacttggcatatccccatgtcgacgttctgtccagatgaaatcccggacgggcgcacaacaaggattcgactgtcccttctccctgataattcttcggagcattgtaaactgtatgttccaacgcacgccatgcttccgctacttccggtgacaaatcatttccataccgcgctttcagatacgcttgcagccattcatccggtgaaaaacgttcttcccgccaaggaagctcatacagcaattcaaacatcaccggattattctcgattccttccggagtagctcctacccccctcaaggttttcccgttgacatgtgcacaggcgttataatatccattcaccaactgctccatccgtccatgcagaccgacattaccgccaaagttaagcaacatacaataaagccagtcatgcttgccgaaacctttctcccgataccacatcgactccggatcaccccattgcgggagcttttcactatacaaatccagtaccagcaaatcactggaatcgagcgtgttgaccatcgcttcccgcggattcgcctgccatgcctgcatcacccacacagcctccggattcgctttcttcatagcactcataatagaagttcccgcctttgctaagtctactccttccgtatttcctccttcatgaaaggggtccatactgtaatactttgcttttccgtacagtttctccaactcctcataatacatggcagcaaatgaatcgaaatgttcatcttccgtagaaagaaaggccggacgaggaaaaccgcaccatttaccgggatcggcaatctgataccccagtttctcaccgatattacgggggaccattcctgcatatccggggaataccggttcaatgcccagctccctcattcgggcaatgatcttcttttgcagtgcttcctgttgccgataccaactgtcgggattcggtccgccccatccttccagattattcatctgccaccatgccataaaggcaggaccggaaataaactcattgatctcctccgtcgtatatccgatacgcttcagcagattataccagacaacctccatccctgttatactcaaaggcatattgatgccgtgcatcgccatccagtctatttctttctcccagcgttcccagtcccagaaagccatggagtaggaataggtacagtaattcaggtaatatcgattcttcatagccgtcgcctgtcggattttcttttgaggcagaggcagtacttccggcaacttctgcgagggattattccacgaaagatgaatacctgccacgtatttcaggtaccaattcaagcccgtagccagtgaaagatcggagtttccggttatcagtactttgccatccttggagtctatctcaaagtagtcttttgccggatcggtttcatcagtaaccaaccggaaaaggatttgatctttcgacgtattctccgtcacacgtgctgccaatgaatcgattggagcagacgtggactggcaacttgtatacattacaacagaaccgaataataaaagtaatagaaggcgcatgttcatagtcattattttttaagggtcatcaaatgtgtttgagcgtttgagcctctaaatatatttcaaatttccgattactgaaaataaaatgtagttcttttatactgatacacattaaataacctccaatatatgaaaagtcggaaagattcggttgactcaccgactgtttccgacagatagcattggctctaataaagaaagaagatgtgtcaaacagttatttgcacatcttctttcaatttgtgtttcagttaattattactcccatcccggattattgggggccagttctgggtttaatgcgatttcattagtaggcacctgatacagataatacttatctaaccaacctttacctgctaccaaaggatcattatacatatagataaaaccttctttctttcctgtcgtatcggcgtatcccttttcaagatcaacaaactgtccagagtcgccaatctgctctttagtagcccattgaccatactgtatcttattgataaaccaaggtgcctttttccaacggcgcacatcgtagaatccaaatccttcacccatcaattctactatacgctcgcgacgaatctcccacaatacagggtctacggtctggtcgcgcttcggatcaaatccggcatttatctcggccactttcatatgggcaactcccacccgatcgcgtaacttattgatagtaagatcagcaactgtctgattgaagccttcggcacctgtaccacctttttcaaatttagcctcggcataattcaacatcacttcatcaatcttgaacaaaggtacatctgaggtcccttcagtctctttcgaattatcccaaacattatagtatctatacacatagttaccgctacgggctacgaggaaaccttgtccgccattgttggtgaagaagtgaggcatccctttcaatatagcagcagaccagttcatcaatgggaacactttatgtttaccggcttccccatttccacccccgaaacctgtgtaacgggtaatgcccatgatatccataaactcacggtctttaggatcggaggtatactcccaactggtattatcggcacttgggatcaccttataagggggagctacagtctccagcagacgaaggtcacgattgcggaaggtagcattcatactattatccccatcctgcgaccattcatattccgagctgttatgaatcgttttaccatctttacaaagatacatgtcgatgatgtgttgcggcatttccacattatgggtggatgtccgttcaacatgcgtcagtacataattagtcagttctttttctatatattccttatacagaatgatgcctttcattcctttcaggtcagatgtcagcatctctccccaatcactattcagttcgggataagaatccatcagcttcttggaataagtgatacaagcatcaaagtatttatcttcgtcccccaaagcatgatatttacgccatgtaccttcaaaaaggcagaaacgggaaagaagagcacggacaacgtgcacattgatcgtattttcaccgtcaccttcttcttttatatgctcttcagcgtatatcaaatcgttcaatacatgatcggcaacttctttgcgaggtgtacggggaccatatgctatttccttatccgaatcacccagcacacgatctacccaaggcacatcaccaaaacgagctatcagttccgaataataataggcacggaagaaatatcccaccgaacgccaatgttccttgtccgcatccgtcatccctgagttatcgatatttgccaacatgacattgacccgatagacgaagctgaatgcccatccattgcctgatgatgaactggatacattctgaaaagcatacggattaccgtcaccctgacgacgcatcagataacctgcataaatatcgcttgtataggatgcggcactggcataggctccgtttgtaccgggaatacgcaggatattagtatttgtaaatactccgtacaatccccaggcataggtcttgaaagtattataattactgaacactgtctgctccgtcaacgaagtatccggatagcgttccataaaactatcgttgcatgaagtaaatccgattgctgctgccgcaagcatagtatatattatttttttcataaccaattctaaattaaagagtaacattaaaaccaaaagaaatcgtacgatagaaaggatatccccaagacagacgttccgggtcataacccttcatcagcttagtaaatgtgtgaaggttctcacaacttacgaacgctttcaaactcgttaatgtaacaggtgccaaccagctcttcgggaaattataactcaaagtcacattcttgacacgtagataagagccattcatcagatacttcgtttgcgcacgtgtattataaccggaattgtttccttgtccgtaaatacggaagtattccgcattcggattggctgccgtccagtcgccattggcagaatctaccggtttccaataatccagctggtctttaaagagtgaaccgaactgtccggaattaaacggccagcggcgtgcatcactgatccatacatcacgtttacctactccttgcagcaaaacactcagatcaaatcctttgtaattgactcccaggtttataccatactgcaaacgcaaagagttattaccgattatcttgcggtctcccggattgtcaaaggttccgtctcccgtatcaatgcgattcgtactcgatccatcatcacgcaaattctggtacttgatgtcgccgggacgcggacttactccatccactgtcaccaccccttctttcaatttccaggtatttgtatcttcaaagtcatcggctgtatagtaaccatccgttacatacccccagatagaaccgatttcatatccttcataataattattcgtgccatcacttttcaggataatcttggattcattatggtatttggtaacgactgttttagagtcataaagattgaagcctacattatagccccatgcaccgattctatctctccaggtcaatgataattcccagcctttcgtacgcaagtcagcggtattctgcaaaggtgcggaagcacctaccactgacggcaactcagctcccggagcaagcatatctttcgtatcacggcgataccagtcgaaagtactttgcagacgtccgttcaaggcagttatatcaaaaccaaagtccaatgtttctaccgtttcccaagtaaaactatcactgaccagtcccggagcattcaaagtcagcggcttcgctccattcaccaaccatgccacatccttcttttccacttgcgacatagtcggaacaaatttataaggatcaataccctgattacctatttgcccccaggttccgcgaagtttcagatcgcttagccagtcacctgcaaccggtttcataaagttctcgcgagcaatgttccaacccacagatacagaagggaagaaaccgaaacgatttttcttcgggaatttagacgagccgtcataacgaccattggtctcaaacaaatatttgcctttataatcataattaacacgatagaaagcaccacgcacggtatacacgcgatgatcatctgtaataaccttattctcaccggtagccgtactatgtgacggatacttctcgttaatcatatcataagaataagtatacaatttcttccagtcactggattcctggttgaagccgcccattaatgacaagttatgcgtgtcattccatgaatatctataattagcatacaggttgatggcattataatcagtactttggtgagtcgtctccagagaagaagtagtggcagtctgtatttttgccagctcaaccgttgtataatcaatggaagccttattcacattctgattactccatgtcttatcaaatgtatattcaaatgccacttcaagccctttcaatggtttcaataccgtttttgacaggatacgggcattgtctctgattgtattgttatccgttgccattctcaaaacgttggaaggcgtattcgtcatcaggctggtgccgtcaggcaaagtcagggagccttcgggatatacaaccgacaaacgcatatcatacaatccggtcttatccgaagtcacaggcatattcttgtcactctgagcatagcgtatatctacagactgagtcagccacgaggtgatttcagcagaaatataggcactacccgacaaacgtttgtagcggtctttatcggtgatcaaaataccttgctcgctattataaccaagggacagacgataagccagcttatcagtaccaccactcaatgacacattatgtgcttgcagaaaaccgtaatcatcaagcatattggcatacaggtctttctcattcagataataattcaatcctgtttccgggtctacatataccccgtctccggtagtctggaatttacccggattcttacgatattcggtcaggtagttcatccatgttttgatatcttgcccggtgtagtatttaccggcattgaactcgccgtccaggtaagcctgcatccactccagcccgtcagcctgttccggacgattgatagaactctggaaaccaaaattattattataattgacatgaaacccgtcgcctttcttcgccttctttgtagtcacaagtattacaccgaaagcggcacgcgcaccatagatagcggccgaagcagcatctttcaacacagaaacactttcgatatcttcgggattcaacatatcgatatcccccggaacattatctatcaacaccaacggaccaccgccattgatggaagtcgtaccacgaatattgaatgatttgctctgtcccggaccggcagcatcattattaggagtaatctgaagtcccggcatcgcaccctgcaaagcactcatggcatttacaacaggacgactccccagtacatcatccatctttacctgagataccgcgccggtcaggttcgctttcttctgtacaccaaaaccaactactaccacttcgtccagactctgtgtgtcttctttcaatactaccgacagcgtctttcccggagttactttcagggactgtccttgataaccaatataagaaatttcaagaatggcgtcttttgaaccgacattcagggtaaaattaccgtccatatcagtgatcgtgccattggaggagcctttttctatcacactggcaccgattaccggttcacctgccgcatccacaactcgtccgcttacttttaccttttcctgatgcgcctgttcgacagatgccaactccgtagacagaatgatctttttatctattaccttatattctacattcgtatttttaaatacttcgtcaagaactttaaagatatcattacggttagcggagattgtcaccaaccgtttcaaatttatatgagcattgttgtagaagaaactaaattctgtttgcttctctatcgctcttaatacatcctcaactgtctgattacgtacattcatcgtaacctttgcagattgggcataactatctgtcgcattagttaatccgacaaaacaaaataagaataaaataaccagtctcatagtacgtgggatttttttcgaggttagccaaaaagactttaccacccttaaaacttggatgctaaaattgttttgcataattttgtattgatttaagttgaaaatgagttaactatgcttgtctgccaacaagcattttcaattgattcattttagtatggggagatctgccaaaatcttcccatacttttttctaagtgggttttgctttcatactactaaattgttaaaggttaatcaataaatttctattatctctttttttctgtcacttccatccttatcatcattgatatgttgccaacgtattttggaggatactttaaaatattccaggatcttctccaaacgttgatttgtaaaggttcccgtaaacgaactactcttcagtttttcgttcttaataacaaatttcacactatatcttttttccagcatccataatgcttcttccaaaggtgtattatcaagaacaacttctccatctttccaagccaattctgattttcccgaagttttataaaggtggactttatcagtctccgaatcatacaccagcttctctcttggagataagatgatatgtttcatcacagcctctttctcgaacataaaatctacttttccttcaatcaaagttgtaataacctctgtattctgttcatatgcttccacattgaaacatgtacccaatacttctatctgtgattgatgtgtagtagaaaggataaatttcttttccggatctttggccacttcaaagtatgcttcaccacttaacgtcactttacggaaatctccattaaagcgagaaggataagacaaagaagattccgaattcaaataaacaattgtaccatcgggtaatgtcaacgaagttgtcattccaggactggtctttacttccatcatctccgctacctctccggtatcccctttccagttctgccatataaataaggtaagaagaggaataaacagaattgcagcagcacgttgtgcccactcccaccacactgtccttctcacttcacggtccgacatttttccctttactttcagtaaagctttctccgtatcaactttcttcattacctgaaccgtgtccacagccaaataaagagcaaaagtctgagtagcaactcgtttattctcctccgactcgtccatccacgcttccacttccagacgttccccctcgctcaacctcccctcacaataacgaggaagcaattcttctattctattattatctaattctttcatcctttattctaccttttattatatgacaagaccaaaccatgacattcctaaacgaaaaccttatttttttcagaaaatctttattttattataaaaaagctatatttgcagcaaattagaatttaataaatgaaggaactacgcataaagaggaatgaccctcaattatctgaaatacagcgtggaggcctaaaagcctttgaaatgctattcaggcaatactatgcagtgctatgtgcctatggtcataaatatgttgactttcacgatgcagaagaaattgtgcaagactcccttctatggatatgggaaaaccgggaaaacctaattattgaatcatcattaagttcttatctctttaaaatggtacatcacaaggctttaaataaacttgcccacattgatgctatcaaacgtgctgaaacgcgtttctatggagaaatgcaagagatgatacaggatatggacttctatcaaattaaagagctaaccaaacgtattgaagaggcggttgctgcattaccggaaagttatcggcaagtatttgttatgcatcgtttccgggatatgagctacaaagaaattgcagaaacattggaagtgtctccaaagactgtagattatcgtattcagcaagcactcaaacaattacgcatcgatttaaaagattatctgccattgctgcttcctttactgtttccttaatataagtgactccttccaataaattggattcgtacctattaaatctataccatccttcaactaaatagagaaaaacggtctctttttaggtaaagttcttttttactctattaattaaagctataaaacagaaaatagtaaatctgtatttatctatagtacaagttgatacagatcataaattctcaaccattctcatcatgatgagaattttttctcaccacagtgagaactttttctcatcgcagtgagaatcttttctcattgcattgagaattttttctcattgcggtgagaatattgtctcatcgtaataagctgaccaaagtctttgaagtctgcaatacataaaactaacaatcataaaggataagaagacaaatacgatgctattcctgctgatagggcagcgtaaaccagaaagtagagcctttgccttcttccgattcaaccccaatcgtccctcctaaccggtcgataatcatctgacaaatggaaagccccaaaccggttccctgaacaaaaggattgtatttcacaaacctttcgaatacatgcctgcattgctcttccgacatgccgcagcctgtatccgaaacataaaagcaaattgtaccgacatctttcagacgatatcccattctgatagaacctgtctgagtaaacttgatggcattgatgacaaagttggaaatcagttgtatcaaacgattcttatctgtataaagggtacattccggcagacgttcggtaaaggtaagagtgacagtttcttttttcaagcgaagcctcatactctgttcgatttcttccatcgtctggttgacatctatcaatgacggacagaagtcaaaagtgccggcttcgattttggacatatccagaatatcattgatcagttgaagaagcaagtcggtatttgtttcgatgatgtccgcatattcgcgcatctccttacgatcttctatatccggcaacatattcgagaagccaacaatcgcattcaacggagtacgaatttcatgactcatattagccagaaaggcggatttcaactgattcgcctgttccgccttttccattgcctcactcagacgagtgtatgccttgcgaaggatacgtatataataggtgatcgctgctatcaaaataagaaggaagatggaacaggaaaggatttcaacacagtattgatgaaatatacttttaggttcgttgacataaacagctcgttcgggataaaggtgatagggaatattgtaggattccagcaccggataacagaggtaggcacttgccttccctcctatactttcgggaatgtcctccgcctgttctccatgcagcacacggtcaataatttcaagcaaggaatcgccgaatgattccgcagaaacgtaatagcctcctgcaaaagtattattggacaggtcttcggaagaaagcaggaacaagggagaggacgtaaaattggtgataatctcctgaatatgatcaaaaagataattattatcttctttattatgcgactcaaaccaggaataataaataattccggtgtttgctttatagctgcgcaaggtgtccagaagcatttctgttgacaagtgagtggtagaaagcaattctaaaggcaggtttggaaaatgcttttcaacagcttctttcacgtctccgcgggtttcttcgctgatgtagcgatcgtccgagataaatgccaggcgatccatatcaggtatcaggctatagatcagttcaacggtttccttcacatagtaatgctgtttcagggtagtcaggttgtagccttttctccattcttgggcggggacgctgttggtttcattcaacggggcatgagagagcagaatctccaaggtagcaggcaggcggtcacgggagttcgttataatcaccggaacatctttccacaggtcgtcaaataaaggacgacagacaatccagcccggatcaccaattatcacaatagcggcaggaggaagcggatatttctgacgcagatgctcgatgaccgcatttacctccatcgtatcctgcaaggccgggacagacaatgattccgctctggcggttattccctgttcctgaagaacatcgtgcacataccaatagaagtttttggcccaaggaaggttgaagttgatggaattcaaaaccaatatttctttatctgatttcccattacctgccaacataggggaaaggagtccttcgaaaagaagaaagaacgcacctgttaagcatattcgcagtaattgtttcattttgctgtgtgattaaaagtggaagcaaagatagtattatttttatcttttaaaaagaaaggcatcccaaatctatcgggatgcctctccattacatatttttatgtatcagttcattatgccttttttaaagctgcgatgctttctttcaaagagctgatgatactttccgcatcggcctgcttcttacgttccatttcgagaacggctgcgggggcgttattgataaatttctcattactgagtttcttcaatacaccttgcaggaatccttccttatgtttcagttcagcttccatacgggcgatttcggcttctacatcaatcatgttgcccaatggcacagcgtattcggtagttcctaccatgaaggaagaagcaccttccgccttgctctctaccactgtaatggaagaaaggttacacatcttctgaatcaccgcattgaactctgcaaccggattttcgcccagcacctgcaagtcaagcggttctttctgagctatgttcttttgcagacggatgctgcggatattactgataactcccttgacaacttcaaactgtgcaacgaatgcggtgtctacataagtatccatgctcaatgcacttaccatcagactttctccttcttccgcattacgttcgtacatctgttgccacaattcttctgtgatgaacggcataaacggatgaagcagatgcaacaggttatcgaggaagcagagagtagcgctataagtggtacggtcaattccctgtccgtaagccggtttaatcatttccagataccaggaagagaattcatcccagaataatttataaacagccatcaatgcttcgctcagacggtatttgctgaacaagtccgctacttcggctgctacttcgttctgcttggattcaaaccagtggacagccagtttagcagcatccgaagcctgaatattatcgtcaaccgtccagcccttgatcagacggaaggcgttccatatcttgctgcagaagttacgtccctgttcgcagagcgcgtcgtcgaaaagaatatcgtttccggcgggagctgccagcatcattcccatacggacaccgtcggcaccatatttgtcgatcagttccaacgggtcgggtgagttgccgagtgacttggacatcttacgtcccagcttgtcgcgaacgatccctgtaaagtaaacgttcttgaacggcatctttccttcatattcgtaacccgccatgatcatacgtgccacccagaagaagatgatatccggtccggtcaccaggtcgctggtcggatagtaatagctgatttcctcgttacccggatgattgattccgtcaaacagggagataggccacaaccaggaagagaaccaagtatccagacagtcttcgtcctgacgaaggtcatccatcgtcaaagcagcgtttcctgttttctctttggcttttgccagcgcttcttcgggagtagcggctaccacatagccaccttccggcaggaagtaagcaggaatacgatgtccccaccacaactgacggctgatacaccagtctttgatgttctccatccagtggcggtatgtattcttatatttggcaggatagaatttcaactcatcgttcattaccggaggcaatgccatatcggcaaaatgctgcattttgaggaaccactgcatagacaatttcggttcgatcactacattggtacgttccgagtaacctactttatttgtgtaagcttctgtcttttcgagcaatccggcagcatcgaggtctttctcaatctgcttgcggacgtcgaaacggtccataccgatatacaatccggcagcttcgctcaaagtcccgttatcattgaagatgtcgatgctgggcagattatacttttcacccaacatatagtcatttacgtcgtgggccggagttactttcagacaaccggtaccgaactcaatgtccacataatcgtcctcgatgacagggataacacggtttaccaacggaacgatgactttctttcctttcagccatgcgttcttggggtcgttggggttgatgcacattgccgtatcgcccatgattgtttcggggcgggtcgttgctactactgcatagcggccttccggatcaccttccaccttatagcggagatagaacagttttccgtgctcttccttgtagatcacttcttcgtcggaaagggcagtcaacgctttcgggtcccagtttaccatgcggacaccacggtaaatcaatcctttgttgtacaggtctacaaatactttcaatacgctttcgctgcgttcctcgtccatagtgaaggcagtgcggtcccagtcacaggatgcacccagtttgcggagctgcttcaggataatgcctccgtgctcttctgtccagtcccaggcatgtttcaggaactcatcacgtgtcaggtctgtcttcttgatgccctgggcagcgagtttgtttacaacttttgcttcggtagcgatggaagcgtggtcagttcccggcacccagcaggcattcttaccttccatacgggcacgacgaaccaaaatatcctgaatggtattattaagcatgtgtcccatgtgcaacacaccggtgacgttcgggggcggaatgacgatggtgtaaggttcacgaccatcgggtttcgaactgaataaacggtgttccagccaatactggtaccactttccctccacgtcagcgggattgtacttacttgctaattccatgtttctttatgtatatgataatgtatattcaaaaaataacggctgcaaaattaataattttaattcaaatcttaccacccacaggatgtttctgtgcccggaaagataatttatatccctcataaacagcaattccataaaataaggcggacatcgacaccacattcttcaccatgacagaaaagatttcgccataatcgactcccgccagcacttcgaaaaaggtcatatcataatccttggcagcaaagccgatgatggataggaaatcacccaacacacaactgatcaatgccagtgctgctccaagaagaccgaagacgggacgtatccccttcccctgccgcatggcgaaaccgaccaggaatccgactccgatagccatatatcccatctgaagacctgtagaaacggagatgagactccatgccaccgcccccaagatacatgcgacggatgcatacagcactcctttgggaagattttcttcggcgagaagttcttcttccgtcattgacaccggaaagtcgtcgggcttgggaggagccatcttcaacagttcttcatccttctcgaagttttcgcattcttcgtcaaagtcaggaagctctctggtacgtttgcaaacaagccctttcccattcacgaaatcacgtgacacgcaattccggcaatacttttcaatttcttctacggtagccatctttcgtttaacagtttttttgcaaatatagaggtattttttcgcgtgacgtttatttaatgcatatttttgttgactaaaatctgaacggatgatgaaacggaaactgataattagatatatactcctgggagtactgctgcttctggtatggatgacacagtcgattcccgcgttgggaaacctgtattcacaaaccgtttatcctgtcatctcccgcgtattgtcattcttctccaacttatttccttttgccataggggatctatttattttcgggagtatcacgggagtcatcgtttatcctttttatgcccgtatccgcaagaaactgccgtggaaaaggattctgctacgtgacggggaatatctgttatgggtttacgtatggttctacctcgcctggggattaaactattcgcaaccaaacttttaccagcgtacgcatattccttatacagcttacacaccggagatttttcaagagtttgtggatgactatatcgactcactgaacagttcgtttgttcccgtaaaaggaatccatgaggaacaggtacgtgacgaagctgtcaaactttacaatcaattaagcgacagcctgggagtgcaccgcccgccatttcccaatccacgggtaaagacgatggttttcaccccattcatatcaatggtcggagtaacgggaagcatggggcctttcttctgcgagttcaccttaaacggagacttgctccccatcaactatccggcaacgtacactcacgaactggctcatctgctgggaatttcgagcgaggcagaggccaatttctatgcctatcaggtttgtacccgttcacaaataaagggaatccgtttcagcggctacttctcgattctgaatcatgtactggggaatgcccgacgactgttgagtgaaaaagaatacgccgatataatcaaccgtatccgaccggagattatagaactggcgaaaaagaatcaggaatactggatggctaaatacagtccgttgatcggtgatgttcaaaactggatatacgacctctacctgaaaggaaacaaaatagaaagcggaagaaaaaactattcggaagtgatcgggctgttgatttcgtatcaagtatggaaagcgaaaaccgcatcagaccaataaaaagacttttattagcgcccttgcttctgttttcgtaccgattaaggctataaaagacaaggaagcattatctttgcaacattatttataaaaaaaatcaaaggaatgatacatacaagagaagaacaaatggaagccttcggccgctttctggacatcctcgacgagcttcgggtcaaatgtccgtgggaccgcaagcagacgaatgaaagtctgcgccccaacactatagaagagacttacgaactttgtgatgccttgatgagggatgacaaaaaagatatttgcaaggagttgggagatgtgctgctgcacgtagcattctatgcaaaaatcggttcggagacaggtaacttcgacatcaaagatgtctgtgacaagttgtgcgacaaactgattttccgccatcctcacgtatttggagaagtaaaagctgaaactgccggacaggtatccgaaaactgggaacagctgaaactgaaagaaaaagacggaaacaaaagtgtattaagcggtgttcccgctgcactcccttcactcatcaaggcttaccgcattcaggacaaagcccgcaatgtaggcttcgactgggaagaacgggaacaggtatgggataaggtaaaagaagaaatcggagaattccaagcagaggtagccaacatggacaaagagaaagcagaagccgaattcggtgacgtcatgttcagcctcatcaatgcggcacgcctctacaaaatcaatccggacaatgctttggaactaaccaatcaaaagttcatccgccgtttcaactacctggaggaacatacgattaaagaagggaaaaacctcaaagatatgtctcttgaggagatggacgctatttggaacgaagctaagagaaaaggactgtaacaccatcctccttccttatggaatggatataatacctgtccaaactctgttattcccacttccaatggtctactcttttagtaaagcaacaaagatacatccggaaacaaaaatcagaggctctatccgcataggatagagcctctgatttactctgacagaacgtctgtttcatccaaacagagcctccgttttatttcttccttttcggatcatttcctccgtccttgcggttcatgcctttcagcatttcccgatggaaacgcatctccgcacgttgaacaaggaatatcttcttattggaaagtatctttttaaaccggtccagataagacttatcaagacggtcggcagcgatacggttgtcacatacctttgctacaatttcttcgtactgggcttctgttgttttgtcgtctttacctcgacgcattaaactccacgattcatcgttcagtttcttcttcttctcctgcagttcaaaataaaccgggaagaatttggcagcctcttctttggtcaatccggcctgctcaataatgaacgctttctgtttattccggaattcctcacgggacaaatgctggtcacatccatcggcagcccaaagaacaggcataaagccacataacaaaacgactaaagcgattagtttcttcattttcttattcaatctgttttaataaatcattctacactcgcgtcactcagatagacgtataacgaataatcatccaacatcgcacggtctaacgcaacatcaatcatctcatcggatacctgttccgtatccgcttccatagccgttactgccaccgctatatcatctgccaccggtttatggtctgatgacgctacccggataatcagggcagctcctacaaacatagccgccatatagaataatggtttcaatctcgtccatgtcgaaatatgctcttccttgaaagcgactttctctttttcaggaagtttgttcatcacctctgaagtcagattttcaaagtaaccgtcgggcactttgaaggaatgctcctttccgattttcttcaatagggtatcttcttctttcatacgtttttctcctctcttttgattagacgatgtctgctttaaaaggtttaatctacttcttccaaaaacttctctattttctttaccgcatggtgataggaggctttcagcgctccgactgaagttccaaagatttctgacatctcttcgtacttcatttcctgataatacttcagattgaacaccattcgttgtttttcgggcaaggtgagcaatgctttttgcaataacatctgcacctgatcgcccgaatagtagggatcactctccagcttctgcacaatcgccgcttcgggatcgtcgatagccaccgtcgttgtagcacgctgcctgttcagaaaagtaagacattcattcagcgcaatacggtagagccacgtagacaacttcgcctcggcacggaaatagtcaatatttgtccatgccttgatgaaggtgttttgcagaaggtcgttcgcatcttcatgcgacagtaccatccggcggatctgccagtataactgctcgctgtattgcgccacaatcaactcaaatcctttccgctgtgtactctcctcctgaaggagtttcagaacctcacgttcgttataaggggtcatagtctctcgtatctgtatagttatttatggttatgcacatattctctcttgccaaaaccgtttgggggaagatagccgccgcttcattcaacaatacagactcgtcctcataacgggcggaaaaatgtccgatgactaattgtttcacttcagcattcaaagcaatctgtgcggcctgtgcagcagttgtatgatgagtttcccttgcccgcacctgttcggtctgagcaaaggtggcttcgtggaaaagaaggtctatcccctttatctgctccacgatctcaggtcggtagatcgtgtcggagcaataagcatattttcgtgcaggggcagaaggacgggtcagacgatgattcggaatgacttctccttcgggagttacaaaatccgctccgttcttgatccggttcagttcgtaaacgggtactttatagaaatccaccatatctctgatgatatgattgggacgctgcttttcttcaaaaagaaaaccacagcaaggaatacggtgtctcagaggaatggtggtcacagccaccgagcggtcgtcatagatcagcgtcggctccttcgtctcaaattcatggaaaaagactttataggccagcgttttgcaaaagaaagaaagtaaaggagcaaacagttcttccagtcctttgggtgaatggatatgcaagtctgccgttcgtcccaacagaccgaaggtggaaatcagtcctaacagtccaaagcaatgatcgccatgaagatgggaaataaagatatgattcaagcgggaaaacttcaagcgggaacgacgcaactgcatctgcgctccttccccacagtcaatcataaaaagcttttcacgcaagttcacaacctgcgatgtcgcaaaatggcgagtggtgggcaaagcagaaccgcatccaagtatatgtagttcgaatttctccatagcggcacaaatgtacacaagttttttggtatttgcgctatcatggcaaaacaaaaaaagcgccccgataatcggagcgcttttccattatatagaaataacgattatttctttccttccaactgttctttcaaagcagccaaagcgtcgatgtcgcccagcgtagttgaagcagcctggttctggatcatcggagcatcttctctcttgttgttagaagacttcttagcaccggaagcagctttcttttctgctctttcttcagccttagctacatcttcgaagatacggctgtgagacaggatgattctcttagcgtccttgttgaactcgatcactttgaattcaagtttctcatccaactgagcttgtgaaccgtcttcttttacaaggtgtttcggagttgcgaaaccttctacaccgtaaggaagagctacaacagcacccttatccaacatttcgatgatagtaccttcgtgtacagaacctacagtgaatactgtttcgaatacatcccaaggattttcttcgagttgcttgtgaccaaggctcaaacgacggttttctttgtcgatttccaatacctgaacttcgatgtcagcaccaatctgagtaaattctgacgggtgttttactttcttagtccaagaaaggtcagagatgtggatcaagccgtcaacaccttcttcgatttctacgaatacaccgaagttagtgaagttacgtacttttgcagtatgcttggaacctacaggatacttttcttcgatagtttcccatggatcttgtttcagttgtttgatacccaaagacatcttacgttcttcgcggtccaaagtcagaactacagcttctacttcgtcgcccaccttcatgaagtcctgagcagaacgcaggtgctggctccaagacatttctgatacgtggatcagaccttctacacctgtagcgatttcgatgaatgcaccgtagtcagccataacgacaactttacctttcactttgtcacctaccttcaagtcagtgtcaagagcatcccatgggtgcggagtcagttgcttcaagccaagagcgatacgtttcttttcgtcatcgaagtcaaggataacaacgttgagcttctgatccagttcaaccacttctttcggatcgctaacgcggccccaagaaaggtctgtgatgtggatcaaaccgtctacgccacccaagtcgatgaacacaccgtaagaggtgatattcttaacagttccttcaagaacctgtcctttttcgagcttgccgataatttctttcttctgttgttccagttcagcttcgataagagccttgtgagatacaacaacgtttttgaattcctggttgatcttaaccactttgaattccattgttttgccaacgaatacatcatagtcacggatcggtttaacgtcgatctgagaacccggcaagaatgcttcgattccgaatacgtctacgatcataccaccctttgtgcggcacttgatgaatcccttgataatttcttcattttccagagcagcgttaacgcgatcccaagaacgagtagcgcgggcttttctgtgtgacagaacgagttgtccttttttgtcttcctggttttcgatgtatacttctacagtatcacctaccttcaggtctggattgtaacggaactcattcaaaggaatgataccgtctgatttgtaaccgatgttcacaactacttcacgcttgttcattgcgattacggttccgtcaacaacctcacggtcgttcactttgttaagcgtaccgtcgtaagctttttctagttcttcgtggcttgcgcttgttacagcttcgccgttttcataagcatcccagttgaagtcctcaataggagctacgttctttaagttttccattaataaataaattgtttaatactttaattgaataagacattatattatctataaatcgggcgcaaaggtaggaatattttcttgaccgacaaaagaatacccaaagaaaagatggtaatatccgtattttttgtaatattgcaaatctaatattatacgactttcaacatgaacggaacattggacaaaatcagggtgcagtttgattatctgccacttattaatttcgcgatgcagcaaaacaaagtatcggtcatccatcagctttcgattgaaaatatgacgtccgaacccttcagaaacattcaggtacaaatcacggccgagcccgacttcggcagtatcactcctgtgatgatggaagcgattcccgccaataattccgtgtgtctgcaatcgttcagcctggtcttgtccgccaattatttcgcccagctgaccgagcgtatgtcgggaagtctgaaaatagaaatccgctccgaggcggaaacgatctttacccagacctaccccatcgacattctggcatacgaccaatggggcggaatcaatatattccccgagatgctggcagcattcatcaccccgaatcatgccgtgctcactcctattatcaagagagccgccgccattctggaacagtggaccggtactccttcactggacgaataccaaagccgcaatccggaccgtgtgagaaagcagatggcagctatctacaccgccctcaccgaacagcagattatttacagcaccattcccgccagcttcgaagagcacgggcagcgtgtccgtctgatagattccgtactggcacaaaagctcggaacttgtctggatatggcactgctttatgcttcctgcctcgaatccatcggactgaatgccctcatcgtcatcaccaaagggcatgctttcgcaggcggctggctggtgccggaaacctttccggaccctgccatcgacgatgtatccttactgaccaaacgaaccgccgaaggaatctacgacattacactggtagaaaccacctgcatgaatatgggacataatgtcgacttcgacaacgctgtgaaaagcgctaacggcaaactgagcgatccgggcagtttcatcctcgccatcgacatcagaagggccaggcattcgggagtccgcccgatcccgcagcgcgtactgaacggacaagtatgggaaataaaggaagatgaggatatgaacagaaataccacgcacgctactccgcaaagcgtgaatccatatgatttgtcgggcagcgaaactcagacagtcctcaccaaacagttgctttgggaaagaagactgctggatttgagtctgcgcaacaacttgctgaacatccggattacaaagaatactcttcagctgattccggcaaaccttgcctgtctggaagacgccttggcggaaggagatgagtttcgtatcctccaccgtcccgccgaatgggagaatccggcgatggagtttggcatttattcttccataccggaatcggatccgatagccgacttcgttaattcggagctttcacagaaaaggttacgtttttacttgccggagaatgacttgggcaaagcactgactcacctgtaccgttcgtcccgtacttctatcgaagagaacggagcgaacacgctttatctggctctcggacttctgaaatggtacgaaacgccttccagcgagcgtccccgttatgcaccgatattgctgctaccagtcgaaatcatccgcaagtcagccgccaaggggtatgtgattcgttcgcgggaagaagaaacgatgatgaatatcaccttattagaaatgcttcgtcagaatttcggcatttccgtaccgggacttgatccgcttccgacggacgaaagcggaatcaacgtaaaactgatttattccatcatccggcactgcatcaagaatcagcggaaatgggatgtggaggaacaggctattctaggtatcttctccttcaacaagtttatcatgtggaacgacatccacaacaatgctcacaaactgactcaaaacaaggtggtctccagcctcatcaacggaaagatcgaatgggacgtaactgcgaaagaagtggatgccgcctacatggacaggcagttatctccggcagatattgtactgcctatcattgccgattcatctcagctggaagcgatttatgaagcggtgcacgacaagacttttatcctgcacggccctccgggaaccggaaagtcccaaacgataacgaatatcatcgccaacgcactttataaaggtaaacgagtcttatttgttgccgagaagatggcagccctctccgtcgtccaaaacagactggcgggcatagggcttgccccgttctgtctggagattcattccaacaagacaaagaaatccactgtcatctcgcaactaaaggagacaaccgaaatcatcagacgaactcctcccgaagagttcatgaaggaagccgaacgcctgctgaagttacgaacggaactaaacaaatacatcgaagccttacacaaggaatatcctttcggactttccctctatgatgcgatcatccactaccagttaacagacgttgaaccctgcttcgatattccgtcatcttatctggacaatctggacaaagaccgattctcacattgggaagatgccatcgaatctttggtcagtaccgccaatgcttgcggccacccgtatcttcacccattgacagggattttcattcgggaatattcgtccgccatcaaagaggaagccttacaaacgctcgccactttcattggcttattgactgccatacaatcgaaactgcctgtcttttccgctttactggaaaatacggacattcatcccacccgcaaggatttcaatataatcagcgccattatccgaaaaatactcgatattccggaactgacgcccgaactgctgaccactcctttattaaatgaaacgctggaagagtaccggaaagtgacggaacacggcaggaaacgcgatgaaatcaaagcagaaatagaaaacggattcaccaaagaggtactgaagataaacgccggccccatgctggccgaatggaatcgggtatccgcccaatggtttctcccacgatatttcggacaaagaaaaataaaaaaggtgattcgtccttacgctctgcaaccggtaaagccagagacagtccagcctttgctccatcaggtcatccggtatcaggaagagcttgattttacagacagatacaccgccaagctgccttctttattcggaagattcggaagagatgaagagtggcccatcatcgatcagatcatccatgaggtatcttcgcttcattccctgttactgagttattcaaaagatgtggcgaaaacatcccgaatcaaacagaacttagcgttacaactgacagaaggtatccggacattcagagatatccattctcattctctgaatgaattgtatcagctggtcgacacgcttacggcaaccgagcaacggctttccaccactctgggcataaccgtagagacgctttatacaaactccgccgactggatcggcatcgccctacagcaagccggaatatggaaagaaaatctggacaaactcaaagactggtatcaatggcttcaatcctacaacaaactgaacgagttgggtctcggatttatcgcagaagaatataaggaaaagaatattcctacggatttactcaccagcagcttccgcaagagtttctaccaagccgttattcactatatcatcgccaaagaaccgacgctggaattattcaacggcaagatattcaatgatattataaccaaatacaagcaggtatccgccaacttcgaggacattaccaaaaaggaactgttcgccagactggcttccaacattccgtccttcacccacgaagccattcaaagttcagaagtcggaatattacaaaagaatatacgcaataatgcacgcggaatatccatccgcaagctattcgatcaaatacctatcctgctgtcccgtatgtgtccgtgtatgttgatgagtcctatatcggttgcccaatatatcgatgccgatgcagagaaatttgacttgatcgtcttcgacgaagcttcacagatgccgacttacgaagcggtaggtgccatcgcccgaggcaagaatgtagttatcgtaggcgaccccaaacagatgccgcctaccagcttcttctccgttaataccattgacgaagacaacatcgagatagaagatctggaaagtatccttgacgattgcctcgctctctctatcccttccaaatacctgctgtggcattaccgaagcaaacacgaaagtcttatcactttcagtaactccgaatattacgataataagctgatgactttcccgtcaccggacaatattgaatcgaaagtcagaatggtcgccgtagacggttattatgacaaaggaaaatcccgtcagaaccaagcggaagcgcaagccatagtagacgaaatagcgagaaggctgaggagcgaaaaattaaggagaaaaagtatgggggtagttactttcaacgtggttcagcaggcgttgatagaagatttgctatccgatctcttcgcctttcatcctgaactggaaacctttgcgctggaatgtgaagaacccctgttcatcaagaaccttgaaaatgtgcaaggagacgaacgggatgtgatactgttctccgtcggctatggtcccgatgccgaagggcgcgtcagcatgaacttcggtccgttgaaccgtgcgggaggtgaaagacggttaaacgtagccgtctcccgtgcccgatacgaaatgatcatcttttctacgctgagatcggacatgattgatctgaaccgaacttcttctatcggagtagccgggctgaaacgcttccttgaatatgcggagaaaggaaccaagcgcatactgaatacttcgactaatattcggacctcggaagaagaaacttctatcgaaaagattattgccgacaagttacgttctttgggatataccgtacatactgatataggctgttccggatataagatcgatattggcattgtcgatactcaaaccccgtccaactaccaattaggtattatctgtgacggaaagaactacagacgtaccaagactgtccgtgaccgggaaattgttcaaaacaatgtactcaaagcactgggatggaatatctgccgtatatggacgatggactggtgggaaaagccggatgaagtgatggcgtctatacaagcagcgattgctcaggatatgaaagcggagaaaccggttatagtaaaaaaggaacaagaaaaaagagaaaagaatgtgcaggaaacgccgatgcagctaaaatctgcatgcgcatacacaaacttttcttttatctccgtacaaaattataatagtactaaaatacgtccgttcctgtacgctgccgacgacatcttcgctaaaagaaataatcctattattgtctcccaagtccaaaagataatagaaaatgaagccccgatcagcaaaaccttacttggaaagaaaatcatatccgaatggggagtcaaccgtgtaggaccacgaatagatgctcaattggaaataatattcgacacattacatctttaccgcatagaacatgacgggcttatcttctgctggaaagatgaagcgcaataccgttcttattcagagtaccgtcccgattccgaccgagatgcagcggatctgccacccgaagaaatagccaatgccatccaacaaatattaatcaattccatcagcctgcctttacccgatttggcaaaagcatgcgcacaagtattcggcttcacacacatggggtcaaacatcgaagcatccatgctcagagggattcaggaagcggtaaaaaggaattatgccaaagttgaaaacggaagggcaacgatcatcgattaacacggtaaggcagacacaaacagccgccacccgtcaataccccttctgcaaacgtttcagagcagcaatagaatcagctacatacgtattatccggttctatggaacgccaataacaaagcgaccctatcaaccgtttcagataggcaggatcatgggagccgattctgcgttgatgttccgccagcccctttgtcaaaatgaaatagacattcttgcgaatctctctctttcgggctttaggaatggtcagcttcacaccggagctgacggatacgcccgtgattatcttcctgtcattctcattcagaaaacgagttttctgatgattcggttcaaacttctcttccctgatgatttccttgacccgggcaagcacctcctctttcggaaagacatcgcccgaaaaggtgaggtcgtcggcataacgactataagtcagcccgaattcttccgccatcaccgccagtttccggtccatctcataagcgatgatgttactcagtaccggactggtagacgctccttgcggcaaatgccgacgcatacaacacaactcgcccagcactttcgatatattcttcggatagccgatcttttcgaaagtctttttcaccctcggactacgtatggaaataaagaaatcatggatatccgtcttcaagacacagcgttttcccagatgaggacggacgttatcgacgatggaatgctgacgccggaatcccgtagcggcaggatgcacatttacagacagtaatatacgatgataaatagtatcctgaatggctttcagttccttgtccggagcagagatcatacggtatcctcctctccgctttctgatccagaactcccgataatgcgaagagacatcctgcagtatctctttcaacctcatcacctctattcccaacagattggcacaccacaccaccgcctcttcatcaaatacaggacatgttctcattttaggagtgactactcctaaagcatgcctgagccaggctccatgttcccatttgtttttggaagtctcttcgttagtagtattaccgctgcctgttgctttccatctcttatatccttcctgtttccggctcgaagaaatcaatttataaatcagaaaaccggtaacaataagtatcgtaattaaaattccgtccatcttgttgttacatatataaaaaggagaagaagaggatgagattttactaaaataaatagaggtatttataccagagatttattttccaggaaaatacctgtgcctgcgaggcgactacacctcttttctgctaaatttttcctcatcctcttcctcacaaagatatgtattttctatacattatgcaactgttatgaagaaaaaactatcggttaaacaactcgaaagtaaatttacatccgatcccgctgaacttccagttctcactgctgacgaatactcccacatcaaagacatgcgtaccgataccataacccacttccagatatggctggagatgcggcatagagagcgcactgatataaagacgttcgttctgcacatagcgggtatatttcatcaaatgccggagaataaggaaaggagcctcgtaagtgaaatgtccgcgtacatagcggcgggaggagttgtaccaacgtccgtcgagcacctgaaacacaccaccgatttcatcattccaccctaccggcagattatgacgggcaaaattggcaaagtccacaaagtacagttcatcctgattggtaaacgccccgaagccgaaacgataataaatatttcgcatcagccccagctgaatcttatgttgaaggtcgaattctatccgttcatattctccagtacttttaaatactccttctattccccgttcatagtccaccgaaaatgtcggatagtcagagcggagattgatcttacgctttccgttcatataataataaagcgccggagtccattccacccggatgcgcggggcaaagctgatataggtatttctgaagcgttccataaattccggcggaggcatcggatagtcacccgtaatcacaaaacgggatttctcgacagctgttctcttgtgtgccgagaaaccgaggctgatatccagtccgttggtaatttcaaaactatgacggaagttgaaatacaagtccttgaaataatccagatggatgaggtcgaaattaaagatactgtccggcatcgctttcagttcgtccagcatcttgctgctatagatacggttaccattacccacactcaaccggaaaaagccccgtttctgcggccagtactcaaagtcggcattcagcgaccagtagaactctttccgtgtaaagttataacccagtttgggtacgatgcggagccacttgtcgcctctgaaaatccggttgtaacggaaatcctgccggtatgataatccgttgcttccgctataactgaacaaaagcggattgataaacggcgagaagcggacacttccgatattggacagattgaatttataatcttccaccatcaggtcgcccatcgttccccagaaagcctgactcttggattttcgttgcaccgacacggtatcccgtctgtatgcataatccttataaagttgtttttccctgtcactcaaaggaatgggacgtaatacgccaaacgtggaagcatctgttttataggcattcgtatcacactgcaaggagaatgattccgacaaattatactttttcttctccttcttccgaacctttctttctttcagttctattgatttatagtccaacgaagcggtataattgccgtccaccttattgcccaggaacttaaaaagggcctccacatcataacgcaccgggagaaactcatctttctttccaacttcccccatcttgatccagcaagtaaacgtaatcagttccgaccgtcccgaaaaacgtatttcacgcacgctccatacattgctgctgacaatcatatagccgcccaccagctggtcgctcttggtacggggaatgaaacgtatccggtagtcgagattattgggatcgcccatcacactgtctatccggtatttgtagtatttctgcccgttcttggcaagcggagacagcaagcgttcgtcattcagaagagaagatgagtagatattgacactaaaatattcaagtaatcccggcagtcccctgtttcctctcacagtgccttgtgatgccttaactttctggtcatagatattgggagctgtataatgcaggtcactatacgtttcgagcaagtattcacgtacccccttctgcaagcgaaacatcgaaggaacgtaccggaggataaaattcttcttctgaatattcatcttaccctttatatataggttcgcgcgatagtcgctcactatactttcataagagggagcaaaagtcatgacacgctcaatgatggaatcagcagatatctcctgacttgtataaggattaagaacaagattggctgcccccttcggaataaaagagaacaagcacaacatacatcctatcaatatcttatatttcaatcgtcgtatctccttgtttattgtaggcaaatataaaaaagaatatcgaaaagcaagggaattaagctgcaaaaaagcgttagcaaggaaaatcctttctcaatgccacgcatcatatcagttttcatggacatttttctacttattaaatccacttcccaatttcttcaatcattacagtagaatacaataaacattttctctataaaaaataatatcttcgagtgcatgaattaattcgtccggctataggcaacgtttcgtccgcctataggcaaacgcaacgtcgactataggcaaacttgcatccggctataggcggacgaattaatttatgcactccaaagtattatttattgcacaagccgggactaaatttagtataggataaaaaaacgcatatgcaaatgaacgcctcgatgggaaaacatttacagttcctcacccaaatggctatggacagtactacaatgaagctgctatacagaaacataaacaagcattatatgcaggtagaaatactagtcaaacagatggctgcagaaatcgaccgacagaaaaacaaggacggacagcaggaaatactggaatccatctcttaatcggttataatcaaaaagcgccatgacgggcaaaaggtaattcagagacgaatcagtcctttaaagagggggtgttcctcagaaaattatatgttttttctgaaaataccctcttttaaataggggtactttcagaaaaaacatataattttgcgccatcaaccgataaaaagaagacgatttatgtcaaaaatgagattttacgcattacaagaactttccaaccggaagccgctggaagttactgccccttccaacaaactctctgattattatggtagccacgtattcgaccgcaagaagatgcaggagtatcttccgaaggaagcctataaggctgttaccgatgcaatcgaaaaaggtacaccgatcagccgtgaaatagccgacctgattgccaacggcatgaagagctgggccaagtcgctcaacgtcacccactacacacactggtttcagcctctgacagacggaaccgccgaaaagcatgacggctttatcgaattcggcgaagacggcggagtcattgaacgattctccggaaaactgctgattcagcaagaaccggacgcttcttctttccccaatggcggtatccgtaatacattcgaagctcgcggatataccgcatgggacgtttcttctccggcattcgtagtagataccacgctctgtatccctacgatttttatctcttacacaggcgaagcgctggattacaagactccgcttctgaaagcacttgccgccgtagacaaggctgccacggatgtttgccagctattcgacaagaacgtaacacgcgtctttaccaacttaggatgggaacaggaatatttcctcgtagactcctccttatataatgcacgtcccgacctttgtctgaccggacgtaccttgatgggacactcttccgccaaagaccaacagctggaagaccactatttcggctccattcctccacgtgtcaccgcatttatgaaggaactcgaaatcgaatgtcacaaactgggcatccctgccaagacccgtcacaacgaagtagctcccaaccagttcgagctggctcccatcttcgaaaactgcaacctggcaaacgaccacaaccagcttgtcatggacctgatgaagcgtatcgcacgcaagcatcacttcaatgtattgctgcacgaaaaaccatatagcagcgtaaacggctccggcaaacataataactggtcgctctgcaccgacaccggcatcaacctgtttgcccctggaaagaatccgaaaggcaatatgctgttccttactttcctggtaaacgtactgatgatggtatacaagaatcaggacctgctgcgtgcctccatcatgagtgccagcaacagctaccgtctgggagcgaatgaagctcctcccgccatcctctcctgcttcctcggttcacaactctcggcaaccctcgacgaaatcgtacgccaagtaggaaacgaaaagatgacaccggaagaaaagactacgctgaaactgggaatcggacgtatcccggaaatcttgctcgataccaccgaccgcaaccgtacttctcctttcgccttcaccggaaaccgctttgagttccgtgccgccggttcttcttccaactgtgccgccgccatgatcgccatcaacgccgccatggccaaccagttgaacgaattccgcgcatctgtggagaaactgatggaagaaggagtgggcaaagacgaagctatcttccgcctgctgaaagaaaccatcatcgcttccgaagccatccgctttgaaggcgacggttactcagaagaatggagacaggaagctgcccgccgcggactgaccaacatctgccacgtgccggaagcactgatgcactacgtagacaaccagtcgaaatcggtactgatcggtgagcgcatcttcaacgaaaccgaactgaacagccgtctcgaagtagaactggaaaaatacaccatgaaggtacagatcgagggacgcgtattgggcgaccttgccatcaaccacatcgtgccgacggctgtcacctaccagaatcggctattggagaatctttgcaaaatgaaagaaatcttctctcccgaagaatacgaagtattgagcgccgaccgcaaagagctgattcgcgaaatctcacaccgggtgacttccatcaaagtattggtacgcgaaatgaccgaagcccgaaaagttgccaatcacaaagacaactacaaagagagagcattcgaatacgaagaaaaagtacgtccttatcttgataaaatccgcgatcatatcgatcatctggagatggaggtagacgacgaaatatggccgctacccaagtacagggaactcttgttcaccaaataaaaagctcctgaagattgcacgaaagaacctgcttttgtgcaatctttttatagattcgttcattttctcattttttctttctacttttgtgctgtataacacagttttgtagcacccatggtaaaaatgaacatgtcagacatcgatatttcggaaccattatccgatttgttagctcctttgaataacgaacaaagggagtttctgatgaacaattatacaatacagacctacaaaaaaaacgaaaccatctactgcgaaggggagactccctctcatttgatgtgcctcattaccggcaaggtcaaaatcttcaaagatggtgtaggaggtagaagtcagattatccgcatgattaaacagcgggaatactttgcgtaccgtgcatacttcgcaaaggaagacttcgtaactgctgccgctgcttttgaaccttctgttatctgtctcatccccatgactgccattaccacgcttattgctcaaaacaatgatttagccatgttcttcatccgccagctttctatcgatctcggcatttctgacgaacgtaccgtcagcctgacacagaaacatatccgcggacgtctggcagaatcgctaattttcctcaaagaaagctacggtctggaagaagacgggtcgacattgagtatttatctttcccgtgaagacctggcaaatctgtcgaacatgaccacctcgaacgccatccgtaccttatcacagttcgctacggaacgcctgatcaccatcgacggaagaaagatcaaaatcattgaagaagaaaaactcaagaaaataagcaagataggataatacagaccttatacgatcataaaaagtgatctgaaactttaactggaagccgatgttcgtcacatcggcttttttatttctatactattggaacttatcaattaaacaagtacatttgtcctgtcaatatattaataacttaacacaatttcagaccatgaagaaaagtatttcccttcttcttttgtccttacttatgattacccccagttgtcagaagccaaaagaagtgacgaacgagtacaatatcgttccgcaacccaaccagcttgttcccaaagaaggccgcttcgaactgagtaacaaagtccggctggtagttccgtccgatgctccggaagttaaaaaggtagccgacggctttgccgaacaactgaaacagactgccggaatctctctgaaagaagccgaaagcgtggatggaaagcctgctatcagtttcgtactacaagaaggtatgcctaaagaaggctacaaactgtctgtcacccctacccttattacagttacagcttcccagccgaacggatttttctatggtgtacagactatttatcaacttcttcctcccgctgtttacggaaaagaactgaagaagaaagccgactggtctgttccggctgtagagatcgaagacgctccccgctttgtacatcgcggactgatgctggacgtttgccgccattacgccccgatagagtatatctacaagtttatcgacctgttggcaatgaacaagatgaacgttttccactggcatctgacggacgatcagggatggagaatcgaaatcaagaaatatccgaaactgacagagataggttccaaacgtgaaaagacgctggtagactattattatgtgaactatccgcaagtattcgacggaatagaacacggaggatattacacacaggaacagataaaagaagtagtagcttatgctgcaagcaaatatatcaatgtaatccccgaaatagaaatgccggggcatgcattggcggctctggctgcttaccccgaattgtcttgtgattctacacagacatataaagtatcacctacgtggggcgtattcgaacaggtattctgcccgagcgagaccactttcaagttctttgaaggagtcatggatgaggtagtcgaattatttcccagcgaatacattcatatcggaggggacgaatgccccaaaacagcttggaagaacagtgctttctgtcagcagttgattcgtcagttaggcttgaaggatgacgtgactcccagcaaagtggacggaatgaagcatagcaaggaagataaactgcaaagttacttcgttacccgcatggaaaaatacctgaacggcaaaggacgcaatatcatcggctgggacgagattttggaaggcggtctggctccgaacgctactgtcttatcatggcgtggcgttgaaggcggattgaatgcagctaaagcaggacacaacgcaatcatggctcccatgccttatgcttatctggacttctatcaggaagatccggaaatcgccccgactaccatcggcggatacacaacgctgaagaagacttatagctacaatcctgttccggatgatgccgatgaactggtgaaaaagcatattatcggtatgcaaggcaacctctggagagaatatatgaaaacttccgaccgagtagattatcaggccttcccacgtgcaatggcaatcgcggaaacgggatggacgctggatgccaacaaaaactggaagagtttctgcgaacgcatggttacggaatttgagcgcctggaagtcatggataccaaaccctgcctcaacttcttcgacgtaaacatcaatacgcatgtggatgaaaatggtccgttgatggtattgctggaaacattctacccgaatgcggaaatcagatacaccacagacggcagcgaaccgacttacggttctacgctatatgaacagcctttcgcacttgaaggaaatatcgacctgaaagcggccgccttcaaagacggcaagatactgggcaaagtcaccaacaagccattgtatggcaatctgctggcgggaaaaccatttaccgtcaattatacaatgggatggacaggggatattttcggcgacaatgatgtactgggagctgacaaaacaacttttggtctgacaaatggaaagagaggtaacaatgcttcttacactccgtggtccagtttcgcaatcgtagaaggtaaagacctggaattcatcgtccatctggacaaaccgacggaagtaagaaaagtggtcttcggctccttgtttaatcctgccatgagaatgctccccgccggaggagttgccgtagaagtatctgccgacggtcagcaatatactcagatagccgaaaaggccttgaagcatgattgtccggaaacgggaagaatcgcattcaccgactctatcgaattcgaaccgacacaagccactttcctgaaagtaaaaatcaagaatggcggtaccttgcgtaatggcgtcaatttcgaaaagaacaacggcccggaagtcattcctgccgaattgtggatagacgaaatcgaagcatattaatgcctgtgagataacaaaaaacggtggacattcagcttgttgctcatgtccaccgtttttttatcgattcagttcttatttattccatgcaaagcattccgccttacttcatctttaaataattccctttgcagagagataacgttccgcttcgatagcagccttacagccacttcccgctgctgtaatagcctgacgataatgcggatcagccacatctcccgctgcgaatactccgggaattttcgtacgggggctgtcaccatctgtaataatgtaacccacttcgtcagtatcgatatactccttgaagatatccgaattcggtttgtgaccgatagccaggaagaagccgtcgatcggcaggctgtaacgttcttcgtccgattcgccccaacgcttcacgacattcataccttctacgccgttgtcgccaaacaagccgactacattgtgttcaaaaagaacttcaatcttctcatgcttctgcacacgctcctgcataatcttcgatgcacgcaggtaaggtttgcgaaccaccagatatactttggatgccagaccagccagatagatcgcttcctcacaggctgtatctccaccgcccaccactgcaacgactttcttccggtagaagaaaccgtcacaagtagcacaagcgctaactcccattccggcgtatttcttttcgtcttccagtcccaggtatttggccgtagcaccggtagaaatgatcaatgcttccgtttcaatcaccttatcaccgtcaatcattattttataaggagctttgctcaaatctgccgctgtagcaataccgaaacggacgtctgttccgaaacggctggcttgcgcacgcaaatcttccatcaactgcggaccactgattccttccggataaccggggaagttctccacatccgtagtagtcgtcaactgaccaccgggttgcaatccttcataaagcaccggacaaaggttagcacgtcctgcatagatcgctgccgtatatccggcaggccctgagcctataatcaggcattttactttttctatttctgccattttattgttatattattgttttatattccaactatctcatctcttactcaaaagaacatcctatcgtaagtctatcacttccgcagtggggtatgccttccggtcgaaagtgaaaacatgatccgcataatccagtccggtctgataagctgtcacggtaatctcattacgcgttttctgaccacgttgctgaagctgaatgtaaaccggttcatacgtactctttgtcacataaagcgtaatactttccaactcttgctttttatcattagcagtcagaatcacttcccaaacagctttaccctgatataccttcacagttcccagcttataagagaatcctttctgatacatataaagaaaggtatacggattgatttgctgcaactcttcctgagtaggattgctgacattcacttcatcatttctcaccatgtaactccactgtgttttcccgtcaaaccaagtggttgtctcggaggtcttcagcataaacttctcgcctttcaactggatgataccattctcacgtccttccagatgaccgtcattgacagccttcaaggtaaaatcaacccttacaccacctgccttcttaaatgcttcggctgtcttctccagaacaactttagcctgcgactgctgttgttgagcaatcacaggcagtgacagtaaagctattaaaacactaaaaatgtattttctcatttgattaataaacgatctgttattgtaaattgttcaaacgcatttcaagatcattatcgtcgatgcagagtacatcacgagccttgcttccctgtgtgggtccgacgattcccgccttttcaagctgatccatgatacgtccggcacgattgtaaccaatagcaaatttacgttgaattaacgaagtggaaccttgctgatggatgaccaccaagcgtgccgcatcttcaaataacgggtcgagacgtcccatatcaatgtcgcccacttcactaccgctgtcttcgctcacatactcgggcaggaagaacggagttggataactctgctgacgggcaataaacttcgtgatttcctccacttccggcgtatcgataaaggcacactgcacacgtaccggatcagcaccttgcaggaagagcatatctcccttaccaatcaggcggtttgcccccggacggtcaagaatcgtacgggagtccatcatagcagatacacggaacgcaatacgtgccgggaagttcgccttgatcgtacctgtaatgatattcgttgtcggacgctgcgtagcgataatcatgtgaataccgaccgcacgtgccaactgcgcaatacgggcaataggaagttccacttccttaccggcagtcatgatcaaatctccgaactcgtcgattaccaccacaatatacggcataaacttatgtcctttctccggattgaggcggcggttgataaacttctcattatactccttgacattacgtacatgagccatcttcaagaggtcatagcgtgtatccatttccacacaaacagaattcagcgtttgcactaccttggtcacgtccgtaataatcggttcgcctccgtcgggaagtttggccagaaaatggttttcaatgacggagtaaatgctgaactccaccttcttcgggtcaaccagtacaaatttcaattcagccggatgcttcttatataataaggaagtaatgattgcattcaagccgacagacttaccctgcccggtagcacctgccaccaacacgtgcggcatcttgcaaaggtcgaacatgaacacttcgttcgtgatcgtcttacccagtacaatcggtaagtcaaacttggactcctggaacttcttacttccaatcacgctctgaccggatacaatcttcggattcttattcggaacttcaataccgatggttcccttacccggtatcggagcaataatacggataccatccgctgacaaactcagggcgatatcatcctccaggccccggatcttcgagatacgcacaccctgttcaggggtaatttcataaagagtcaccgtaggacctaccgtagctttgatcgtactgatttcaatgccaaagctgcgcaatgtattaatgatacggtctttattcgcattctgctcgtccatgtcaatcgtcggatcgtcattctcaaaatgcttcatcaagtcgattgtcgggaaacggtaattttccagatccttcatcggattataaggttcttgctccggaccctgatattcttcttcggacgtagctgtctctacctggaacccgggttcatcctcacccggcaattcatcctgagcagcaggaggaaccacatcgcttacggtcggttcaaagaccatagtcaccccttccgcctcatcagcagaaggaagttcgtcgtccggttccggtgtgttgaccggagattcttctttcggttcttctgcctgtatatccatcacgggagcaggaggaggtgtttgcttataagtacgtttcagattaaactccacttcctgcggttgcgaggtcgtgaactcctgtgttccttcttctgctgtctctttttcctcttctttcttctgacgtttgaggaaactcagagcaaaaagtttgcgcaaccagattatcgtccgtgcacttatgtagataaagaaacagactgccgttatcagcaggatcatccatactccgggaactcccacctgcgaaaccagccagcggcttacattgtaaccgtgcatacctcccagataaatgaaagaatcctgataatgatccatcaaagcgaaaccgaagaatacggagaaccaaatcaataataatgtacaaccgataaaccatttccacagacggacaatgcgcacccgcatcagcttcaatcctgccaccgccaaaaagacaaggataaagaaagaagatattccaaaacagtcatttatcagataactagccaactgtgctccgcgagatccagcatagttttttacattgttattaaccgccgcaaggtctgccgagttgccgctgtcgataatactttggtcggctgcccccgtaaagaagaaggaagaaaaagccaacaaaagataaacagaaaagattaccagcatcaatccgatcacaaaatgaacggtttcattcttaaaaattgatacaatccttccaggagaagacggagtgcgttcagcctccttatctattttcttttttgccatgagtctttattctttaaataaattggaatccgtattataagccgcaaaaataataaaaaaataacgagcagtactctcattcaatcctttttcttacctttgcgattcaaatcaatctgattatggaaaaagaaagccaaacgatatttgaaaagaatgtgatcgagttcgtaacggtagccgccgaattttgcgcattcctcgaacgtgctgaacacatgaagcgcaaagcttttgtcgacacgtccttaaaaatacttcccctgctctatctcaaagcatccttgcttccgaagtgtgaaacgattggagacgaggcacccgaaacgtatgtaacagaggaaatctacgagattctgcgcatcaatctggcagggctgatgggtgaaaaggatgattatctggacgttttcgtacaggatatggtgtacagtgaccagcctatcaagaagtccatctcggaagatttggcagatatctatcaggatatcaaagattttattttcgttttccagctgggactgaacgaaaccatgaacgactcgctggccatctgtcaggaaaacttcggtctgctgtggggacagaagttggtaaacactctgcgtgcccttcacgatgtgaagtataaccagcagaatgagaatgacgaagaagacaacgaggaagagaataacgaactaagcgatgacgactattgttgtgaagaagacggttgtcactgccacgacgacgaatgtcattgtcatgaggacggttgccattgtcgtaatgacgaataaacaaaaatgatagtaagaagaagtataaataaagacgaactaaaggaactcccgaaaactgtatttccgggacgaatccatgtgatccagtcggaagcggaaacagaaaaagcagtagcttacctgcaatctcagccgatactgggtatcgatagcgaaacgcgcccatccttcaccaaaggacaaagtcataaagtagcacttctgcagatttcttcagacgaatgctgtttcctgttccgcctcaatatgaccggactcacccaacctttggtcgacctgctggaaaatccggctgttatcaaagtaggactgtcgctcaaagacgactttatgatgctgcacaaacgtgcaccttttacccaacagagctgcatcgaactgcaagactatgtacgccagttcggcatacaggacaaaagtctgcaaaagatttatgcaatcctgttcaaagaaaagatttccaaatcacaacggctgtccaactgggaagcggacgtactgagcgacggacagaaacaatatgccgctaccgatgcctgggcttgcctcaacatctacaacctgttgcaggaactgaaacgaaccggcaactacgaggtcgaaagcctccctgtagaagaagaggttgacgcaaatactcccgccaatcgctgacaaatgaccgataaaagactaattaataactgataaaatagcattttaaacaacatgcataaagtatacctcaaacccggcaaagaagagtctttaaaaagatttcatccctggattttctccggagcaatcgctcgtttcgatggagaacccgaagaaggtgaagttgtagaagtatacacttcgaagaaggaatttatagccgaaggacatttccagatcggaagtatcgccgtacgtgtgctctctttccgtcaggaacccatcgaccacgatttctggaaacgtaaactgcaaattgcctatgatatgcgttgtggaatcggtatcgcagtcaatcccaccaatgacacctaccgtcttgtacacggtgagggagacaatctgcctgggctggtcattgacatttatgcccggactgccgtcatgcaggcgcactccgcaggaatgcatgtagaccgcatgactatcgccgaagccctgtcggaagtaatgggtgacaagatcgaaaatatctattataaatcggagactacactgccttttaaggcagatctttttcccgaaaacggtttccttaaaggaggaagcagcgataatatcgcacgggaatacggcctgaagttccatgtagactggctgaaaggccaaaagacaggattcttcgtagaccaacgcgaaaaccgttcactgctggagcattattctaaagaccgttcggtactgaatatgttctgctacaccggcggtttctccttctacgctatgcgtggaggtgcaaagctggtacattccgttgacagttctgccaaagcaatcgatctgactaacaaaaacgtagaactgaatttccccggcgatgcgcgtcacgaagctttcgccgaagatgctttcaaataccttgaccgcatgggcgaccaatacgatttgataatcctcgacccgcctgcatttgccaagcataaggatgctttgcggaatgccttgcaaggttaccggaaactgaatgccaaagcattcgaaaagatcaaaccgggcggcatcctgtttactttctcctgctctcaggtggtaaccaaggataatttccgcacagctgtgtttaccgctgctgctatgtcaggacgtagtgtacgtatcctgcaccaactaacccagcctgccgaccacccggtaaatatataccatcccgaaggagaatacctgaaagggctggtactctatgtagagtaatatatgtcataaacaccatgaacttgcataaacaaggggtgaataaaagaaaaataatagtttcaaagttaattagagttaacaaatagaagtttttcggcaaatcattatgttctataacataaaaccctttatatttgcactgtgtttttcatggtattagatttaaggttaataaagattggctgtctgggatagatagccttctttttttatatgcctatccaccctctttttaacagcaattcttcactattcttcgcatttatggcttttttatcccctttttatcgattaacttgtccacccaatcaacgaaaatattatatttgcatctattattaacgtaaaaagagaaacacaaattagaaaagtcatgagtataaaagttcgtttgatcattatgaacttcctgcaattctttgtatgggggtcatggttaatttcactagggggttacatgggcagagaactccacttcgaaggaggacagatcggtgccatcttcgccaccatgggtattgcctctttagtcatgcccggcatcattggtattatcgccgataaatggttcaatgccgaacgtttatacggactttgccacatcgcaggggcagcttgtcttttctatgcctctaccgttacgaattatgaccagatgtattgggctatgctactcaatttattggtatatatgcctaccctgtcactggccaataccgtttcatacaatgcactggaacaatataaatgcgacctgatcaaggacttccctcctatccgtgtatggggaacgattggttttatctgcgccatgtgggcagtagaccttaccggattcaagaattccagcgcacaactttatgtaggcggtgcatccgcactcttgctgggtttatactctttcaccctgccggcatgcaaaccggccaagacagaaaagaaaacattactttcttccttcggactggatgcattcgtattattcaaaagaaagaaaatggctattttcttcctgttctccatgcttttaggagcagcattgcagatcaccaacacgtatggtgaccttttcctcgggagcttcgccagtattccggagtttgcagattctttcggagtaaaacattcggtgatcctgctgtctatttctcaaatgtctgaaacattatttattctcgctataccattcttcctgagacatttcggcatcaagcaagtgatgctgatcagtatgttcgcctgggtattccggttcgggctgtttggcttcggagatccgggttccggtctgtggatgctgattctttccatgatcgtgtatggtatggcgttcgacttcttcaacatttcaggttcgttgtttgttgaacaagaaaccagttcctccatccgtgccagtgcccaggggttgttctttatgatgaccaacgggttgggtgccatcatcggaggatatgccagcggtgctgtcgtagacgcattctcagtatatgctgatggcaaactagtgagccgtgaatggccggacatctggtttatctttgcggcgtatgcactggtgatcggcatcctgtttgctctggtattcaagtacaaacaccaacgagagaataaagtaaattaagtaaaaaagaacaatggacaaaaaagtagaattacaagttttaaatatcacaaatagccaagcgcaagtaggcgcttttgccctactgttgggtgaagtgaacggtgaacggcaactgcctatcatcataggtcccgctgaagctcaggcaaccgccctgtatatgaagggggtcaaaactccccgccctctgacacacgacctgttcatgaccattatcggcgtattaggagctagtttgctccgcgtattgatctacaaggcgaaggacggtattttctattcctacatttaccttaaaaaagacgaagaaattatacgtatcgatacacgtacctcggatgctgtcggtatggcaatccgtgctgaatgtccgatcctcatttatgaatccattctggaacaggaatgccttcggatatcgaacgaggaaagaagacatcctgaagagtctgatgaagaagcggaagacgaaaagaagcgggatctgcctcgcaacgttacttcaatgtcactcgaagaagcattggatcaagcaatcaaagacgagaattacgaactggctgccaagatacgcgaccggatcaattcaagaaatcaaaaccactaaccaattatgcacgtattttatactcccgatatacagaaaaactacgaacttccggaagaggaagcacaacattgtacccgcgtcctgcggttgggtatcggagacgaaatcactcttacggacggtaagggacatttctataaagcagaaatcacggttgcaaccaacaagcgttgccttgtagccatcaaagaaacaatctttcaggaaccgctctggccgtgtcatctgcacattgccatggcgccgaccaaaaatatggaccgcaatgaatggcttgccgagaaagctacggaaatcggatttgacgaactgacttttctcaactgccgtttttccgaacgcaaggtgattaaaaccgaacggatcgaaaagattctgatatcagccatcaagcaatctcttaaggctcgcctgccgaaactcaacgaaatgacggacttcgacaagttcattgcacaagagtttcaaggtcagaaatttattgctcactgttacgaaggcgaaaagcctcagctgaaaaatgtactgaaagcaggagaagatgctctcgttctgatcggtcccgaaggagacttcagcgaagaggaagtgaagaaagccatcgaatgcggattcactcccatcagcttgggtaaatcacggcttcggacagagacagcggcactcgtggcttgccacacaatgaacttattgaaccaataataacttttaaatagtatgagtatggcaaagaaaatgatctcacggctctcggtactggcagtactgattgtgtttctggcagcatgttccaaacaaacggaatatacgaacgtaataccggcagacgctacggctgttgcctctattgatttgaaatcactggccaacaaagccggaatgaacgacaaagaaaatgaagctgctaaacagaaactgctggaagcaatgaaaagcgggatgaatgctgccactttccaacagttggagaaggtgatcaacaatccgggagcatccggcctggatccggaagcaccgatctatatctttagctctccccaaatttccggtggtgcattcgttgccaaagtcagcaatgaagacgatttgcacgcttccctcgatgtgatggcaaaagaacaaatctgccagccggtcagcgaagcggacggatatagcttcactaccctgaacggaaacttgcttgctttcaatgaaaccactgcaatcattatctctgccagcagaacttctcagacagaagcagccaaagaagccatcaccaaactaatgaaacagactgccgacaacagcattgcgaaatccggagccttccagaaaatagccaagcaaaagagtgatatcaacttcttcgcctccatgtcagcaatcccttctacttacagaagccagatcagcatgggacttccttctgaaatcaaaccggaagacattaccatcctaggcggactgaacttcgaaaaaggcaagatcgcccttaaaacagaaaactacacggagaacgacgccgtcaaagcgcttctgaaaaaacaaatggaatcatttggaaagacaaacggcacattcgtgaaatactttccggcatctacgctgatgttcatcaatatgggcgtaaaaggagacggactttacaatctgttgagtgagaataaagaattccgcagcactgtgtctatcgccaaagcggatgaagtaaaagaactgttcagttcattcaacggcgatatctctgccgggctgatcaatgtaaccatgaacagtgcccctacttttcttgcttatgctgatgtaaagaatgggaatgctcttgaagctctttacaagaacaagcagtcactgggcatgagaaaaggagaagacatcatggaactgggcaaagacgagtatgtctacaaaacaagaggcatgaatatatttttcggcatcaaggacaaacagatgtatgctaccaatgacgaactgctctacaagagcattggcaaaacggttgacaaatcgatcaaagacgctccttacgcagcagacatgaaaggcaagaccgtatttatggccatcaatgcagaagccatactggatttaccggtcgtaaagatgctggtaggcttcggaggcaaggagttcaagacttattctgatctcgcttccaaagtttcttatttatccgttagttcggaaggagaaacaagcgaaacagacctttgcctgaaagacaaagatgtcaatgccctcaaacaaatcgtagattttgccaagcaattcgccggcatgtaattcgtcaatgaacggcatgaatagtattcacttacagcaaacacttccccaagtgtttgctgaccgtaattcggtgacctctgatgtatggcatcaggaccttatcttccggaaaggagaaatgtatctgatagaagccgcctcaggcaccggaaaatcatcgttgtgcagctatctttacggctatcgcaacgattatcaaggaattatcaatttcgatgaaaccaatatcaaagcatattccgtgaagcaatgggtagacctgagaaagcattcactgagtatgctttttcaagacttgcgtatcttcaccgaacttacagcgatagaaaacgtacaactgaagaataaccttaccggacacaagaagaaaaaagagattctttcattattcgagaagctgggtatctcagataaactgaacgtgaaagccggaaaactttctttcggccaacaacaacgggtcgcttttatccgtgcattctgccagccgttcgacttcctgtttctggatgagcctatcagccatttggatgatgagaacagccgcatcatgggagaaatcatcattgacgaagccggaaaacaaggtgccggagtcatcgccacgtccattggcaaacatatcgaactgccatacaagaaggtgcttcaactataatagaatctgcgtcattcgcgcctaaaaatataaaaatacaaaataatgaatacccttgtctggaaacttctccgccaacatatcagtatcggtcagttagccggtttctttttagccaacttgttcggcatgatgattgtattgctcagcgtacagttttacaaagatgtcattcccgtattcaccgaaggagacagctttatgaaaaaagacttcatcatagcaaccaagaaaatcagtacgctcgggtcttttgccggaaaaagcaatacgttctctcccgaagatatcgccgatctgaaaaaacagtcgtttaccaaaacgataggagctttcactccttctcaattcaaagtttcggcgggattggggatgcagaaagcgggtattcatctctctacggatatgttcttcgagtcagttcccgatgaatttgtagatatcaaactcgacaaatggcactttgacgaagaaacacataccattcccatcattatcccacgcaattatctgaatctgtataacttcggtttcgctcaaagccgcagtctgcctaagttgtcagaaggattgatgggacttattcagatggacatcatgatgcggggcaacggacgggtagaacaatacaagggaaacatcgtcggtttttccaaccgtctgaatacgattctcgttccgcagtctttcatgaactgggcaaacaagaacttcgcccccgacgcggaggcacaacctgcccgactgatcatcgaggtcagcaatcccgccgactcttctattgccagctactttcagaaaaaaggctacgagacggaagacggaaaactggatgccggaaagaccacttatttccttcgccttatcgtaggtattgtgctgggagtaggtttattcatcagtatcctgtcattctatatcctgatgctcagcatattcttactgctccaaaagaatacaaccaagctcgaaagtctgcttctgataggctacagccccaacagggtagcgctgccttatcagatactgaccgtaggactgaacatcatcgtactgattttatctgtcggattggtatgctggctgcgcagctattacatagagagtatcagactcctcttcccgcaactggaaaccggttcgttatgggtagctgtcagtatgggtattcttttattcctcatcgtatcagtcattaatatactggctgtgaagcgaaaagttctttcaatctggatgcataaaagttaaaaacacaatatatgaaaaacaccactactcttcaaagtaaaagaagtatcacagtactcttgggagtccttctatatttctcatcgctatctgcacagaccatgcaagatacgattatcgccaacttcagtctgatggaaagaattcctaaagaaaagttgtacctccatctggacaagcctttttacggagccggagaaaagatatggttcaaaggttatctggtgaacgccatcacccatcaggacaacgcacaaagtaattttatcattacggaactgatcaaccgttccgactccattgtggaacgaaagaaaatccgcagagattctctcggattccacaacgccttcaccctccctgccacccttccggcaggcgattattacctgcgggggtatagcaactggatgctgaatgaagaccctgactttttcttttcacgcaacatcaagataggaaactctattgacaataccatcgtttcgagcatcgagtatcagcaagaagatgatacacattacactgccaagatcaaatttacaagcaacgtacaggctgtttttgaaaatacaacaatcaaatacctataccttgagaatggtaagataaaaaacaaaggcaaaaaaaagacggacgaaaacggctggatttccatttccctacccgatttaaaatctccggtagcgcgcagaatagaagtagaatttgacgatccgcaatatatctacaaacggactttccatcttcctgtgtttaccaatgatttcgatgtgaagtttttccccgaaggcggtgccttgatcaacattcctcatcagaatgtcgctttcaaagcacagggagcagatggcttctctaaagagatcgaaggtttcttgttcaactctaaaggagacacacttaccaatttccgttcggaacacaacggcatgggcatcttcacgatgaatcccgtcaacaatgagacttattatgttacggtaagaactaatgacagtattaccaagcgatttgaccttcctgccatagaaccgaaaggaatctccatcgccatgtcgcactataaacaggagattcgttacgaaatccaaaagacagaagcgaccgaatggcctcagaaactatttctgcttgcacatacccgtggcaaactggccattttacaacccatcaatccgaaaagaactttcggaaagatgaatgacagcctgtttacggaagggatcactcacttcatgctgattgatgaacaaggaaatgcacttagtgaacggttgattttcgttccggaccataagccgaatcaatggcaaatcactacagaccaaccgacgtatggaaaaagagagaaggtatctttacagatcgctgccaaagacagcgagggcaacccggtagaaggtactttctctgtcagcatcaccgaccgaaaaagtattcagcccgactctctcgccgataatatcctgtccaatctcctgctgacttcggatctgaaaggatatgtggaagaccccgcattctattttctgaatcaggacgcccggacgctccgttccatcgactatctgatgatgacacatggctggcgcaggcataaaatggaaaatgttctccgcactccttcgctgaatttcacaaattatatagaaaaaggacaaaccatcagcggacgaatcatgggattcttcggagcaaacgtaaagaaaggtcccatctgtgtactggctcccaaatacaatatcatagccaccaccgagacagacgagaaaggccagttcatcgtcaatacctcattcagagacagcacgacattccttgttcaggcacgcaccaagaaaggatttgccggtgtagatattctaatggatcctccccagtacccggtcgctacgcataaagccccttattttaacggagcaactacctttatggaagattatctgatgaatacccgtgaccagtattatatggaagggggaatgcgtgtgtacaatctgaaagaagtgacagttacagcgaagcgggaacgtccgagttcaaaaagtatctatacagggggtatcaacacctatactgtagaagaagacagactgcaaggatacggtcagacagcttttgatgcagccagcagactacccagcgttacaatcacgaacggaagtgagatacatatccgtaacaattccgaaccggcaatcattgttatcgatgatattgtgtatgaagatgcttccgatattttgaaggatatccaagtcagtgacatgtccagtatcagtctgcttcgaggagcagatgccgtcatactgggtccccgtgcttccggaggtgccgttgtcatcactctgaaagaccctagaaatcttccggccagaccagcgcagggaattatcacttatacgccgctgggatacagtgagtccgtagaattctatcaccccacctatgatactcccgagaaaaagaacgctcagcgttcggacttccggagtaccgtttactggaatccggaattacggttagacgccgaaggcaaagcgaccatagaatactatacaccggacagcacagctcccgaagatatcattatcgagggcgtggacaagaatggaaaggtatgtcgtatcctacagaccattaataagtagcttttctcaacgcttcttcaaacttttatgtagttcaaatttgagttctgcttcctattaaataatcagataaaagcatccaaataacccactgggtcaaaattattttgtatttttgccgtcattaaagaataaagctatgccggactatgatttaatcaccatattagggccaacagcctcagggaaaactccttttgctgcagcattagcccatgaactgaatacagaaattatcagtgccgactctcgtcagatctatcggggaatggacctcggtacgggcaaggacttggcagattatacagtcgacggacatccaattccttatcacttgattgatatcgccgatcccggatataaatacaatgttttcgaatatcagcgggatttcctgatttcttacgaatccatcaaacaaaaaggctgtctgcccgttttatgtggagggacaggtatgtatctggaatcggtactgaaaggctataagctgatgccggtaccggaaaatccggagttacgtgcccgtctggctaatcactctctcgaagaactgaccgaaatcctgaagcaatataaaacattgcacaactctacggatgtggatactgtgaaacgtgcaatccgcgcgatagaaattgaggagtattatgccgtgcatccggttcccgaacgggagtttccgaagttgaacagcctcatcatcggggtagatatcgatcgggaactgcgtcgcgagaagatcacccgacggttgaaacaacggctggacgaaggaatggtggatgaagtaaggcgattgacagaacaaggcatttcaccggacgacttgatttattacggactggaatacaaattcctgacgttatacgtcataggcaaactgacttacgaagagatgttcactgagctggagacggccatccatcagttcgccaaacgtcagatgacttggttccgcggcatggaacgtcggggatttaccatccactgggtcagtgcagagctgcctatggaagaaaagatagcctttgtgatagaaaaactgcgagggaattagtatctttgccagtcatttacgaatggtctgtgaaagataaaaaatgcgattgttaatacagttaggatagaaatacggttatgagtgtagaacctggaaaatggggagtgatctacaaccccaaagcaggtacccgaaaggtacagaaacgatggaaagaaatcaaggagtacatggacagcaaaggtgtcaactatgactatgtacaatccgaaggtttcggttctgtagaacgtcttgccaaaattctggcgaacaacggctatcgtaccattgtcatcgtaggtggcgacggtgcgctgaacgatgccatcaacggtatcatgctctctgatgccgaagacaaggagaacatcgcccttggcatgatcccgaacggtataggaaatgactttgccaaatactggggactcagtaccgaatacaaacctgccgtagactgtatcatcaaccaccgtctcaagaaaatagacgtaggcttctgcaacttctacgacggcaaggaacaccaacgccgttatttcctcaatgcagtcaacatcgggctaggcgcaaggattgtgaaaatcaccgaccagaccaaacgtttctggggggtgaaattcctgtcgtacgttgccgccctcttctcgctgatattcgaacgcaaactataccggatgcaccttcgtatcaatgacgagcacatccgcgggcgcatcatgaccgtatgtgtaggaagcgcctggggctggggacagactccgagtgccgtaccctacaacggctggctggatgtatccgtcatctaccgtccggaattcctgcaaatcatttcgggattgtggatgctgattcagggaagaatcctgaaccataagatggtgaaaagctatcggacaagaaaagtaaaagtgctccgcgcacaaaatgcttccgtcgatctggacggtcgcctgctggcaagacatttcccactggaaataggcgtattatcagaaaagacgaccctgattattccgaattagccaacagaaccgggcttctggcgaaaaacagcccttcactcatgaaactataaataagtaattagtaacttgtaattaataaaatgatcgaacttaagaacaatcctgccggtaacttctttctgctggccggtccatgtgtaatagaaggtgaagagatggcaatgcgcatcgctgagcgtgtggtcggagtcactgaaaaattacagattccttatgtattcaaaggttcttaccgcaaggcaaaccgttcgcgtcttgattcattcacaggcatcggtgacgagaaggcactcaaagtgctgaaaaaggtacatgatactttcggagtgcccacagtgacggatatccattcggccgacgaggctgagatggctgccgaatacgtagacattctccagattccggctttcctttgccgtcagacggatttactggttgctgctgctaaaacgggtaagacgattaacatcaagaaaggacagttcctctctccgctcgccatgcagtttgccgctgacaaagtggtggaagcaggcaacaagaacgtgatgctgaccgaacgcggaacaactttcggttatcaggaccttgtagtagactaccgggggattccggaaatgcaaacgttcggttatccggtcatactggatgtcacccattcattgcagcaacccaaccagaccagcggagtgaccggtggtatgccccaactgatcgaaaccgtagccaaagccggcatcgccgtaggagccgacggtatctttatcgaaacacacgaaaaccccgccgtagccaagagcgacggagcaaacatgttgaagctggaccttctggaaggactattaacgaaattagtcagaatacgggaagctatcaaataactcttttttctgcccgtttgtgattatacacaaaagaatacgacagatatttcaaacaacttttttataaactaaatagaacatgaaacatttattacgtggattttttattgcagttctctttatatgctgcaacttccaactcgtgcttgcacaacctatgcaaacactgcccgtggacaaaaatgtccgcataggtaaacttgacaacgggcttacttattacatccgacacaacgcactcccagaaaaacgcgtcgaatttcacattgcacagaaagtgggttccatccttgaagagccgcaacagcgcggtttggctcacttccttgaacacatggctttcaacggaacaaaaaacttcccgggtgatgaaaccggactgggcatcgtgccttggtgtgagactaaaggtatcaagttcggaacaaacctgaatgcatacaccagtatcgacaaaacagtataccgaatcagcaatgtacctaccgacaacgtcagtgtagtagactcttgtctgctgatcctgcacgactggtcaagcgccatcaaccttgccgacaaggaaatcgacaaagaacgtggtgtgatccgtgaagaatggagaagccgtaacagtggtatgcagcgcatcatgaccaatgccctgcctgtcatgtatccggattccaaatatgcagactgtatgccaatcggaagcctcgatgtaatcaacaatttcccttatcaggacatccgtgactactatgcgaaatggtaccgtccggacctgcaaggtatcatgattgtcggcgacatcaatgtagatgaaatggaagcaaagctgaaaaaggtatttgcagacgtgaaagctccggtgaatccggctgaacgtatctactatccggtagcagacaatcaggaaccgcaaatctttatcggtacggacaaggaaatcgaaactccttccatcagcttcttcttcaagagcgaagccttcccggattcactgaagaatacaatcaactattacggcattcaatacatgattagcatgggagttacaatgctgaacagccgtttggcagaaatccgtcagcaagcgaatcctccttttacaggtgcaagtgcaggttatggcgacttcttcgtagccaagaccaaaaatgctttcggagtagacgccagcagcaaaatcgatggtatcgaactggccatgaaaacgattctcgaagaaactgaacgcgcacgccgcttcggattcaccgaaactgaatatgaccgtgcccgtgccaactatctgcaacgcgtagaatctgcttacaatgaacgcgaaaagatgaaaaacgacacttatgtcaacgaatacatcagtaacttccttgacaatgaaccgatgccgggcattgaatacgaatatgctatgatgaatcagctggctccaaacattccggtagcggctatcaatcaagtgatgcaacagctgatcactgacaacaatcaggtagtactgttggcaggtccggagaaggaaggtgtaaaatacccgacgaaagaagaaatcgctgctttgctgaaacaaatgaaatctttcgatctgaagccttacgaagacaaagtttctaacgaaccattgctgaaagaagagccgaaaggcggaaagatcgtttctgaaaaagccggagatatttacggaacaacaaaacttgttctgtccaacggtgtgaaagtatatatcaaaacaaccgactacaaagctgaccagattctgatgaaaggtaccagtcttggtggtagcagccagttccccgacaaagagattctgaatatctctcaaatcaacagcgtagcaatggttggtggtatcggtaacttcagcaaagtagatttgagtaaagcacttgcaggcaaacgtgcttctgtaggagccggtgtgagcgcaacaacagaaacggtttccggcagttgttctccgaaggactttgaaacaatgatgcagctgacttatctgactttcactgctccccgcaaggacaacgaagcattcgaatcatacaagaaccgcatgaaagccgaattgcagaatgctgacgctaatccgatgaccgcattcagtgatacagtctcttatgcattgtacggcaatcacccacgttctttcagcatgaaagaaaacatggtggacaagatcgactatgaccgtgtaatggaaatgtacaaagaccgtttcaaagatgcgagcgactttacattctactttgtaggaaacattgatgttgagaaaatgaaaccgatgatcgccaaatatctgggtggtctgccatctatcaatcgcaaagagactttcaaagatacgaagatggaaatccgcaaaggtcaatacaagaacgagtttgccaagaaacaagaaacaccgatggcaaccatcatgttcctgttcaacggtacttgcaaatatgatttacgcaacaaccttactctcagcatcctcgatcaggcattggatatggtttacaccgcagaaatccgtgagaaagaaggcggtacttatggcgtaagctgcagcggaagcctcaccaaatatccgaaagaacaactcgtgcttcagattgtattccagaccgatccggccaagaaagacaaactatcgggcatcgtcatcgaacagttggaaaaaatggccaaagaaggtccgtctgccgaacacatgcagaagatcaaagagtatatgctgaaaaaatacaaagacgcccaaaaggaaaacggctactggctgggcaatctggatgagtatttctacacaggtatcgattatacaaaagactatgaaacgttggtcaacagcatcacagcaaaagatgtacaggaattccttgccaagctgatgaaacagaacaacgaaatccaagtcatcatgaccgtacctgaagaagaagctaaataaacttttatagcataccaacagtatgatgatatttaacgaattacgcaaacatggacggctcgcctccaaacggcatccgatgtatgaaaagaacaaagttgccaaaatattcggatatatcggggttgctttttgggcaggatacctgatattcttcggtacgacgtttgcattcggttttgcagatatggttcccaaccgggaaccatatcatgtaatgaatgccgttgccctgatatttattctggcacttgacttcctcttgcgtattccgttccaaaagacaccgacgcaggaggtaaaaccttacctcctgttgccggttaaacgaaatcggatcatcgatttcctgcttatccgttcgggacttagtctgttcaacctgttctggttgtttatgttcgtccccttttccttcattaccattaccaaatatttcggtatctcaggtgtactcacctatctcataggcatctggcttttgatcgttgccaacaattactggtacttgttatgtcgcacactaatcaatgaacgtatttggtgggtgctgctccccatcgctttctacggtggactgggctgccttgcctttattcccgaagacagtcccctgttctacttctttatggacctgggcgacggatatatcaacgggaatattctctgtttcctcggtaccattcttgtcatagccatcttatggctgattaaccgcaaaatcatgtccggcctcatctacgccgaattggcaaaagtagatgatacccgcatcaagcatgtttcagaatacaaattcttcgagcgatacggagaagttggtgaatatatgcggttggaattaaaaatgcttttgcgcaaccggcgttgcaaaggtgcattgcgcaatgttctccttgtagtcatcgccttctcctgcctgttgagcttttcaagcctttatgacacgagcaccatgactacctttatctgtgtttacaactttgccgtattcggcatgatcatcctttcgcaactcatgtccttcgaaggcaattacatcgatggactaatgtcccgcaaagaatccatcatgagtctgctgaaagcaaaatattatatctatactatcggcgagatcgtcccatttgtcctgatgattcccgccattgtaatggataaagtccccttactgggtatctttgcctggttcttctataccaccggttttatctatttttgtttcttccaactggctgtttacaataagcagaccgtagcactgaacgagaaagtgacaagccgccagaccaacagcgccatacaaatggttgtcaacttcggagctttcggtatcccgttgatcctgtattctgtgttgaatgcgtttctgggtgaaacggccgcctactctatcctgttcgccatcgggcttggattcacactgacttctccgctttggatcagaaacgtctataagcgtttcatgaaacggagatacgagaatatggaaggcttcagagacagtcgccaataagagatttacgattgaaccgattaatcatttacgataaaaataccaagacaatgataagcatcaataatcttcaaaagaaattcggcgaaaagttagccgtgaacatagatcactatgaaatcaatcaaggcgatatgctcggattggtaggaaacaacggtgccggtaaaacaacacttttccggttgatgctcgacttactgaaagcggataatgggaatgtcgtcattaacgaaattgacgtcagtcaaagtgaagactggaaaaacttcacaggtgctttcattgacgatggatttctgatagactaccttaccccggaagagtatttctattttatcgggaaaatgtacggactgaaaaaagaagaggtggacgaacgccttctgccgttcgaacgtctgatgagcggagaagtgatcggacaaaagaaactgatccgtaactactcagccggtaataaacagaaaatcggcatcatctccgccatgcttcattatcctcagttgctgatactcgacgaaccgttcaacttcctcgatcccagttcgcaatccattatcaaacatatgctcaaaaagtacagcgaagagcataatgcaactgtaatcatttccagccacaatctgaatcatacgatagatgtatgtccgcgtattgccctgctggagaatggcgtcatcatccgggatattatgaatgagaataattcagctgaaaaagaactggaagactacttcaatgtagaagaataaagttacttataattttacgatatacgaaaagaaagatagccgatgagagtgaacttcaaactaatcttcatactgacaggactgatctttatccttagttcctgccgcacgtctgctccccgtctggattaccaggcactggcacgcgcctccatcctgctgggcgtggacatcaatatggaagataaccacaagctctatctggaatcagccgaatggattggtgttccttatcgtggaggcggcgattcaaaacgcggtaccgactgttcgggactcacctaccagatataccggaaagtataccgtactcaggttccgcgaaatactgaagacctgagaaaagaaagtaccaaagtcgccaaacggaatttgcgagaaggcgatctggtattcttcagcagtagccgttcccgaaaaaaggtagctcacgtaggtatctatctcaaaaatgggaaattcattcatgccagtaccagcaaaggagtgattgtcagtcgactgagcgaagactattacaccagacactggatatccggaggaagaatacgctgattatcaacttaaaaacatatagaatcatgaaatcgtttattggagcagtcatatttatctgcgtagcgttaagcgcaaacgcacagcttttatggaaagtatctggtaacggacttagcagcccttcatacattatggggactcaccatctcgctccgttgagtgtcaaagacggcattaccggactacagaaagcgatggatgaaacacaacaggtatatggagaactgaaaatgtcggatatccagtctccggccaccatccagaagatgcagaaaatgatgatgatagaaagcgatacgactctgactaccctcctctcaccggaagattacgaaaccgctaataaattctgcaaggagaacctgatgatggacctcaacatggcacccaaaatcaaaccggctttcttactgaacaacatagcagtagtggcgtacatcaagcacatcggaaactataatccgcaagaacagctcgatacttatttccagactcaggcaacacaaaaaggaaaaaaagtggatggactggaaactccggatttccagtttaacctgctatacaatggaatttccctgcaacgccaagcccaactgctcatgtgtaccctcaataacatcgacaaagaggtggaaagcctcaaaagactgacagatgcctacatgaaacaagatttggaaaccatgttgaaaatcaacgaagagcgtaaaggaaatcaatgtgatgcacttcccacagaagaagatgccctaatttacgaccgcaataaaacatgggcacagaaactaccggctatcatgaaagccgctcctaccttcgttgcagtcggcgctttgcacctgccgggtaataaaggcttattaagcttactgaaaaaacagggatatacagtagaagcagtaaaataatgaattataaaacttatttattcgatttcgactatacactagccgattcatcacggggtatcgttacttgtttcagaaatgtacttaatcgtcaccaatatacgaatgtcactgacgaagcgatcaaacgtaccattggtaaaacattggaagaatctttcagcatactgaccggagtcaccgactgggaacagctcaccgcttttcgacaagagtacagactggaagcggatgttcacatgaacgtgaatacccgcctttttcctgatacactctctactctgaaagaactaaaagagcgaggtgcccgcatcggcattatctctactaaataccgtttccgtatacttagttttctggatgagtatctgccggaaaactttctcgacatagtggtaggcggagaagatgtacaagctgccaagccttcaccggaaggaataaaattcgctctcgaacacttgggcaggactccgcaagaaaccttatacatcggagacagtactgtggatgccgaaacagcacaaaatgcgggagtagattttgcaggtgtccttaatggaatgactaccgctgacgaactcagagcatatccgcaccggtttattatggagaatttatccggtttgctatatatctgattatcttctgttacaacagcaaaaaaataaaggaaatatttgtctgaaacaaataaaagaagtacttttgtgcccgattattccgcaacgggttcgataaagagctctttaagtgattaaagaccacccgccggagctaacttatacattatatataagatgtacgcaattgtagaaattaacggtcagcaatttaaagcagaagctggtcagaaactgttcgttcaccacattgaaggtgcagaaaacggttcaactgtagaatttgaaaaagttcttttagtagacaaagacggaaacgtaactgtaggtgctccgactgtagaaggtgctaaagttgtttgccaggttatttcaaacttggttaaaggtgacaaagttcttgtattccacaagaaaagaagaaaaggttacagaaaactgaacggtcaccgtcagcagttcacagagttaacaatcacagaagtagtagcttaatcatttaaaaagtaagaagaaatggcacataaaaaaggtgtcggtagttctaagaacggccgcgaatcacatagcaaaagattaggcgttaagatatttggtggtgaagcttgcaaagcaggtaatattatcattcgtcaaagaggtactgaattccatccgggtgaaaacatcggaatgggtaaagaccacactcttttcgctttagtagatggtacagttaaatttaaagtaggtagagaagacagaagatatgtttctatcatccctgctgaagcaacagaagcataacctgtacaactgaaaatattcaagaaaaggagatgtaatccaaaggattgcttctcctttctttttttatgcagattttcattgctcgcttattcgttttttctttatctttgtagccttaataaagaaagttcataaaaagtatagatatgcttaccattaaacaaattacagaaaatacagaagcggtactccgcggactggaaaagaagcatttcaagaatgcaaaagagacgattgatgaagtcatcgctctcaacgacaagagacgtactacgcaaaacctattagataagaacctggcagaggttaattcactttcccgcacgatcggtcagctgatgaaagaaggaaagaaagaagaggccgaagctgcacgtgcacgtgttgccgaactgaaagaaagcaacaaagcgctggacgctaccatgacacaggctgctacagacatgcagaatgtactttatacgatccccaacattccttatgacagcgtacccgaaggcgtaggtgccgaagacaatgtcgtagaaaagatgggaggcatggaaacagaacttcccaaagatgcactgcctcactgggaactggctaaaaaatacgatttaatcgatttcgacctaggtgtaaagattacaggtgcaggcttccccgtatacaaaggaaaaggtgcccaactgcaacgtgccctgatcaacttcttcctggacgaagcacgcaaatccggatatactgaaatcatgccgccgacagtagtcaatgccgcttcaggttatggtacaggccagcttcccgacaaagaaggacagatgtatcattgcgaagtagatgatctctatctgatcccgacagccgaagtacctgtcactaacatctaccgtgatgttatcctggaagaaaaacagttgccgattatgaactgcgcatacacacaatgtttccgtcgcgaagccggttcttacggtaaagacgtacgcgggctgaaccgtctgcacgaattctccaaagtagaattagtgcgtatcgacaagccggaacattctaaagaatcccaccagcaaatgcttgaccacgtagaaggcctgttgcagaaactggaacttccataccgtatactccgcctttgtggtggtgatatgagctttactgctgcgctttgtttcgacttcgaagtatactccgaagcacagaaacgctggctggaagtaagttccgtatctaacttcgacacttaccaggccaaccggctgaaatgccgctaccgtagtgcagaaaagaaaacagaactctgccatacgttaaatggatcagcactggcactaccacgtatcgtcgccgctttattggaaaacaatcaaacccccgaaggaattagaattcctaaagcattggttccatactgcggtttcgacatgatagactaagaaactttctactcctgtaaggatgagatatctctgccccttacaggagtttcctttattaacctttaacacatttacccccatgacaaaaaacacaaaaagtttcgtattgccattggcattcattggcgttatgttcttttcactgggcttcgcccttggtatcaactcagtattagtccccgtattgaagggatcactggaaatcagttcggccgaatcatatctgatcattgccgccactttcatcccgttccttatttttggttatccggcaggccttacaatcaaaaaaatcggatacaaacgaacaatggtcctttcattccttatgtttgccatagccttcggacttttcataccatcggcaagttatgaaagttttcctctgtttttattggcttcctttatcagcggaagtgccaacgcttatctgcaagctgccgtaaacccgtatatcacgattctgggaccgatagacagtgctgccaaacgtatcagcattatgggtatatgcaacaaactcgcatggccgattcctcctttattcctggctttcctaatcggaaaagaagtgaccgatattacagtagctgacctgtttctgccattctacgttattatcgccgcattcatcgcactaggtattatcgcatacatggctcccctaccggaagtcaaagccgtcggtgaagacgacagcgaagaggcagccgaagcctgtccgtacgccgcaaagaaaacctccatctggcaattcccgcatttattattaggatgtcttgctctcttcttatatgtaggtgtagaaaccgtatcactgggtacattagtagattatgccaccagccttcatttggaaaatgcagcaatgtatgcctggattgctccgataggcattgtgatcggttacatctgcggcatcatcttcatccctaaatatatgagccaggctacagcactgaagatttgttcagtgctggctatcatcggttccgtactagtagtacttacacctgccgatatatccatctatttcatctcatttatggcattgggatgttctttaatgtggcctgccctatggcctttggctatggcagatttaggaaagttcaccaaatccggttcatctcttctgatcatggcaatggcaggcggtgctgttattccgaccttatttggctatctgaaagacatttccgatattcagaaagcatattggatttgccttccctgcttcctgtttattctatattatggggtagccggatacaaaatcagaacgaaataaataaagatattcacatggatatggaaagtcactcatcaaaagagtgacttttctttttatatttcgtaaataagccgtatctttgccgaaatttataacattctgatagcagttacgtaataataccaacaaattaattagataatgaacaaaatcattagcaaagaacgcttttctgagaaagtgtttaaacttgaaattgaagctcctttaattgctaaatcccgcaaagccggccacttcgtcattgtacgtgtaggcgacaagggagaacgtatgcctctgacgattgccggttctgatttgaagaaaggcaccatcactctggtgatacaggaagtcgggctctcctctacccgtctttgtgaattgaacgaaggtgattatatcactgatgtagtaggtccgctcggacaagctactcatattgagaatttcggaacagttgtttgtgctggtggtggtgtaggtgttgctccgatgcttcctatcgtacaggctttgaaagctgccggaaacagagtgatcactgtattggcaggacgtaacaaagaccttatcattctggaaaaagaaatgcgcgaaagctccgatgaggtgattattatgacggacgatggctcttacgggcgtaaaggtctggtaaccgaaggcgtggaagaagtcatcaaacgtgaaaaggtagataaatgcttcgccatcggccctgctatcatgatgaagttcgtttgtctgctgacaaagaaatatgagattcctaccgacgtttcattaaataccatcatggtagacggaaccggcatgtgtggtgcttgccgtatcacggtaggaggaaaaacgaagttcgtttgtgttgacggtcccgaattcgacggtcatcaggtggactttgatgaaatgctgaaacgtatgggtgcgttcaaaaaaattgagcgtgaagagatgaacaaactccagcccgaatgtgaagcaacgaaagagatagatgagaaaagccgcaacgcagcctggagacaggaactgcgcaaatcgatgaaaccgaaagaacgtacagctattccacgtgtcgagatgaacgaactcgatgccgaataccgttcacatagccgcaaggaagaagtaaaccagggtctgaccgctgagcaagcagttacagaagccaagcgttgtctggactgcgctaaccctggatgtatggaagggtgtccggtaggcatcgacattccgcgcttcattaagaacattgagcgtggcgaattcctcgaagcagccaaaacactgaaagagacaagtgcgcttccggcagtatgcggtcgtgtctgcccacaggaaaagcaatgcgaatccaaatgtatacacttgaagatgaatgaaaaaccggtagctatcggttatctggaacgcttcgctgctgacttcgaacgtgaaagcggacaaatttcagtacctgtcattgccgaaaagaacggcatcaaagtggcggtgatcggttcgggtcctgccggattatcattcgcaggtgatatggcaaaatacggttatgatgtaacagtattcgaggcactccacgaaatcggcggtgtattaaaatatggtattccggaattccgtctgccaaacaagattgtagatgtagaaatagacaacctcgttaaaatgggcgttactttcatcaaagactgcattgtaggaaaaacaatcagtgtggaagatttgaaggaagaaggttttaaaggaatatttgtcgcttccggtgccggtttgcctaactttatgaatataccgggcgaaaactcgatcaatatcatgtcttccaacgaatacctcactcgtgtcaatctaatggatgctgcgagcgaagactctgacactccggtagctttcggcaaaaatgtggctgtcatcggtggtggtaatactgctatggactctgtccgtacagccaaacgcctgggtgctgaacgtgctatgatcatctaccgccgttcggaagaagaaatgcctgcacgtatcgaggaagtgaagcatgccaaagaagaaggagtcgaattcctgacattgcacaatccgattgaatatattgccgacgaacaaggttgcgtgaaacaggtcattctccagaagatggaattaggagagccggatgcttccggacgtcgcagtcctgtagccattccgggagctacggaaacaatcgatatcgatctggccatcgtcagtgtcggtgtatctccgaacccgattgttccaagttccattaaaggactggaattaggacgcaaaggaaccattgccgtagatgacaacatggaatcatctattccgatgatctatgccggcggagacattgtgcgcggaggagctaccgtaatccttgccatgggagatggccgtaaagccgccgctgccatgaatgaacaactgcaaagcaagtaaaaggacaagcttattataacagaaagccccgtctgctgaatgcaaacggggctttcttatcacaagatacttcttacttcactacgctattcgtcgcagggtccgggaaaatcacggtcggtttaaacgacttcgcttcctcaaaatccatcaatgcgtacgacatgataatcacaatatcatccggttgcaccttgcgggcggcagcaccgttcagacaaatcttaccggaaccgcgttcacctttgattatgtaggtttcaaagcgttcgccattgttgttatcagcgatgtacactttttctcccggaatcatgttggcagcatccagcaggtcttcgtcaatcgtgatactacccatgtagttcaaatttgcctctgtgacacgtgcacaatgaattttcgacttcaacacttcaatcatcataaggtttcgtctttttttaatttagatttctttatacttgatattatcaatcagtctgacctctccgcagaacactgtgatacagcctactacatacagagaatcctcccaactgcttaccttttgcagcgtgtttccgtcaacgatttcaaaatactccaaacgcaatcccggagcatcctctatcgcttcttctaccatcttctgcgtctcactcactgtatgagatgctgcaaaggtacgacttttaaataatgtctgagaaatatttaaagcattttcacgttctcgtgctgataaacgtttattccgactgctcagagccaatccgtcctcttcacgaacgataggacaacctacaatttccagtttataatccatctgacgaaccatctcccgaataatcgccagttgctggaaatctttctctccgaaataagcacgatccggttgcaccgcgtcaaacaacttgctgacaatctggcaaactccgttgaaatgtcccggacggaaagccccttccatcaccgtatccaacggagcatagctgaattcacgcgtatccggctgcggatacatctcttctaccgaaggagcaaaggcaaatgctgccccgcaatcttccaacaagcggcagtcagcatccaatgtacgcggatactttgctaaatcgtttttatcgttaaactgagtgggatttacaaaaacactcactactgttacaccattctcacttacgctgcgctttaccagtgatgcgtgtcctgcatgtaaagcacccattgtgggtaccagtcctaccttcttaccctgggctctcagtgccgtcaattcggcctgtaagtccttgatagtgtgtattactttcatttttgttaattggtttatgttttggtcgtttgcaaaaactctgcaaaataaactaatatttgccacataaagaaagaatatggtatttaaagttccttttttttgctatctttgcagaatattatagtgaactattgttattatgacaaaggcgaataaagttttatttattactcaagagattacaccttacgtttcagaatccgaaatggccaatataggtagaaaccttccacaggcaatacaagaaaaaggccgtgaaatcaggacatttatgcctaaatggggaaacattaacgaacgcagaaatcaactgcatgaagtaattcgcctctccggtatgaacctgatcatcgacgatactgatcacccccttattataaaagttgcttctattcaatccgcacgtatgcaggtatatttcatcgataatgatgattatttccagaatcgcttgcagacagcggacgaaaatggtgtggaatacgatgacaacgacagtcgtgctatcttttatgcacgcggtgtgctggaaacagtgaagaagcttcgctggtgtcccgacgttatccactgtcacggatggatgacggcattggctcctctttatattaagaaggcctacaaggacgaaccatcgttccgtgatgccaaagttgtattctcggtatatgaagatgatttcaagaatacgctcagtgaggactttgcaaccaaactgatgttgaaaggcatcaccaagaaggatttggctggtttgaaggaaccggtagactatgcggcactttgtaaacttgccgttgattattctgacggaatcatacaaaacagcgcaaaggtagacgaatcaatcattgagtacgcccgccaatcaggcaaactggtacttgattatcaggatccggaaaactacgcaaacgcttgcaacgaattctacgatcaggtatgggaaaccactacaaataaagaagaagaataaaaatctagatacgacaatcatgaaagcaaaatatgccttgatagctttactggcaatcacatttttcggatgcgatgataatacaggcggactgggattaggaatgttcccgggcaatgaccaaaatatcaaaggaaagttatccacgtttgatgtaactactgaatctgttaagacaggtgacatttatgcgaaaactaacatcggttatattggcaaattcactgatgaaacatttggcacttatcaggctggattcttggctcagctaaattgtccggatggactaacttttcctgaaccatacaaagaagttacagatgcaagtggtaatgttatttcagccacaggaagaatggttgtcgatgataaagatccagaaaataaagatgttacttttataaaagacggaaatcaaatcataggaaacatacgtgcagtcgaactctacctgtggtatgacagctactttggagactcattgacagcttgtagattaagtgtatatgaactgggaggcaatgggaaagagacattaaatcttgataatgcttactataccgatattaaccctgaggatttttacgatagtcagaatatattaggaaccaaagcatatacagccgtagatctttcagtaaaagattctattcgtaacctaagcacatatgttccaagtgtgcatattgctttcaaagaggatatagcaacaagagtaggtggaaatattttaactgcggcaagaaaagctaaaaatgctgataaggaattcaatagccaattattcagagaagcttttcaaggaatctacgttaagagcgactatggtgatggaactgtactctatatagatcagccacaaatgaatgtagtatacaaatgctatgcaacagattctattaccggaaaaaaattacagaagaaagacggaagtggtaaggactctacttattactcttatcgtgtgtttgctacaactcgtgaagtaatccaagccaatcaattaaagaatgatcccgaaaggatagatgcattaattaaggaagataaaaacacttatttaaagagtccggcaggtattttcaccgaagctacactacccatttcagatatacaaaatgaattgacaggcgataccttaaatgcagtaaaactgacattcactaattacaatcaaacaggtgataagaagtttggtatggctataccatctactgtaatgcttgtacgtaagaaattccaggatagcttctttaaagacaataagctgagcgatggtgtatcttcttatctaacttcacacacaagtagcacgaaccaatatgtattcagcaacatcaccaaattggtaaatgcttgtattgcagaaaaggaagaggctaaaaagaatgctggtagttcatgggatgaaactaaatggttacaagaaaaccctgattggaacaaagtagtccttatacctgtacttgtgacttatgactcttcaaatactacaactggtcaagctaatattattagaatacaacatgatttaaaaccaggttatgtacggctgaaaggtggaagtctaggcaaaacaaatcctgattacaagttgaaacttgaagttatttctacagacttcggattaacaactaagtcaaactaaaaagatatataaaataaacagcgcgggttacttcggtaattcgcgctgtttttttatatgtacctgtaccttccaatatataaaaaacaaccgtgaggtgattcccatctccccacggttacaaccagttaatttattattatcttattcttctttctttgcagtagctttcttacgagtagctttagctaccggttcttttttcgcagctactttcttgggagcttttacagctcctttttcagcttttgcctgccatttggttacttccttttgcagttcggctatctcctcaccctgattcttaatagtagtcagcagagagttgagctcttcattatctacgtcaacaggatacagtgaatctactcgtttgataaagtcgcccaagatattcatgtagttagtgaaggcatcgtaaggagagtcataaataccacggttcagccagatacctgtattcttggtagtcatgaaacggaaattgttgctggcttgcagataatcccagtcctgcttgatacgacggtcgtcacacagatgaacacgttctgctacgctatacaacttgttgaaagcctcacgttgcaggatattacccagccaactgcttgtatctctttcttcgtccacccatgacattgggtaaggaacatccagctgagatacagatttcaatttagatacaatctctgtcggagtagagaacgtgataccctttgatttagcacattcgggcaatgctttcaggaattccaggatattggaagaaagcggctgagccatacccaatgcacttaattccataaagatattaatcacttgctcttcttgtggcaacgcatcaatccagttaatatacttatcagcaaataatggatattccggccattccgaattggagaaacgcaatcctatatcatcagaaagtttaaagtctctcaatagcaatttgaggctcggagcctgattacagtgatatacatagtgtgggctcttccatcccaatacatgttttgcaccttccgtcagcattcccttaaagcccatagaagctaccagtccaccgatttcatccgaataaatcaagctggagttgcggaacaccttcggttctttgccaaacatctgtttcattttatcacgctggcgaagcacttcttcacggaagcagtcttcgttagccaaagatgacaagccgtgtgaataaggttcgcaaaggaactcacaacagccggtatcattcaactggtgcagcaagtcaatcaccgccggagcatgaatttcaagttgctccaatgccacaccggaaatagaaagcgccactttgaaagctcctcccgagtttttcaccatctcaatcaacgtactgagagcaggtatataagatcgttcggcaacctcattcataccggtttcatttgcatagtcatcatagtaataatgatcggtgccgatatcgaaaaaacggtagcgtttcaagtgtataatctgatgtatttcgaaataaagacagatcgttctcatagtctatatcattttattgtttaccataatttttaataacctcatcatagataccgcgaactttatatcccacgttctcccatttaatctcatccacttctttcttaccctcttctttcaggtactcgtacatagccgggtaagtacagatagaataaatggcatccgccatagcgtgaatatcccagtagtcagttttaatacatttatccaaaatttcggcacagccggattgcttggatataatggaaggtacactgcattgcatggcctccaacggagagataccgaatggctcagatacagaaggcataatgtatacgtcactggctttcagcacttcgtacacctgctttcctttcataaaaccggggaaatggaaacggtccgcaataccgcgttcggctaccagacgaatcatttgatccatcatatcaccactaccggccattacgaaacggacattgcgcgtacggtgcaataccattgctgcagcttctacaaagtattccggtcctttctgcatggtaatacgtcccaggaaagtaacgaccttttcgctcggattcttttgaggaacaatatcctgtatctcttgtgacaaaggagaaacggcattatgcacagtagacaccttcttcgggtcctggaaatacttatggatcacagtctgacgggtcagttcgctcacacacatgatgtggtcggcattgtccataccattcttctcaatggcatacactgtcggattgacattgccgcgactacggtcgaaatcagtagcatgcacatggatcaccaatggcttaccagatacttgcttggcatgtatccctgccggataagtcagccagtcatgagaatgaatgatatcaaactcctgctgacgtgctaccaccccggcaacgatcgagtagttattgatctcttcgtgcaggttgtccggatagcgtccggagaactcgatacatcccagatcattcgtattgagatagttgaagtcagcgtagatatgatcgcgcaagtcatagaacaattgcggatccatataactgcctacgcgtcctttcacatagtcccaaccgacatttttccacactaccggcgtgctgttcatgccgataattcttaaaaagctctgatcttcgtctccccatggtttgggaatacagaatgtaatctccagatcatcctgctgagacattccttttgtcagaccataactggcagtccctaaccctcctaagatatgcggggggaactcccatccaaacattaaaactttcattttcgttcctcctctttttaataatacttagacagtagctttagaatacgcagtacttcggcgacattcatggcaaacgatacagctccgcgtcctttaaaaggcggattaccatcgaaaagttcaggcaacgaactgatacaatgaattgtcagttcatcttcgagaccaataagctggcgttcaatgaacgacaggccactcatcttataaattcgcagataggcttccatatagaatcccatcagccaaggccaggctgtgccttggtggtaagcgtagtcacgctgtatctgaggaccaacatagttagggttatagcccccgctcttcggactcaaggtacggagtcccttgggggtaagcaactctttggttgctatgtcgagcacttgcttcttttgtgccctatccaacggagaataatcgaatgctacagcaaatatcatgttggggcgtacgctccagtccatcatatttccgtctacatagtcaagtaaatatccatattcgttgcggaacacttcgataaatgattttcccgtcacttccgcctgtgcgtcaagcgcatcggccaaaagaacgtttccatcttcacgaaccagatcggcaacgaaacgaagcgcattataccacaaagcattaaattctacgatatatcctgtacggggaatcaccggatgtccgtttacggtggagttcatccacgtaatcgccttatcggtgccattggcataaagcagaccgttttcatgcaggaagaggttctcatgtttccgctgacggataaattcgatgatatctttcagcagttcgccatatttctgacggcattgttcgcgggaggtctccttggcatactgttgcaaagcccatacggcccaaagcagtacatccggatgttccatctcgtaaatcttgtatcctgccggctcatcattgatgaagcttcgaatcgctttttccgctgtcttcatcacatcttcaaactgatccacctcgtccagcgcaagtgtcagtcccggcaaggatataaacatatcgcgggcacggcacttgaaccacggataaccggcaaggatataatgttctccttcctgctggttgtggaactgatgtgctgagtttttcagacagtgatagaagctatcgcgaggcgtacggtcagccacttcggcttcgaacgtctgcttcagtctgcgcggagtcacttcggaagtacccgcggagaaaacgatgctttctcctttctttatatccacttcaaaatatcccggaacatataggtcttcattgaagtcatagcctcgttcttgttctttcggatattcgaatccacgataccagtcgggctggaaatggaactcgcaagccttgttcaactgcatgaacagttccggataaccgggatacatacaagtcttgataccattttccacaagctgataatcgcggcttgcctgcgcattctcgtgagtgtactctcgcacgctccggaaagcgaggaacggtcggaagcgcaaagtcgtcgccgaatgtgcgtccaacaaagtataacgaatcaggattctgttttcatgatgtacaaagattttttctttgcgtaacactactcctccaacacggtaagttgtcgccgggatatgctcacaatcgaattcacggatatacttatgtccattcggactaaagttgtttccctgatatttatgcaaccccaagttaaactcagcaccatgttgaattaccgtttcatcaagagaagatagcagcacatgattttcatcgtcgatattgggaacaggaattaccaacagtccgtgatatttgcgtgtgttacaatcaacaatcgttgtacaatgataagctcctgctttgttcgtccggagaatctccctttggagactttcttccagattcgtcatgagggtcttgtcaaatcgtaaataactcatagttgtgcattatttaaaggttaattattggtcactatattccttatatatatctattgctgttctgtatatataccagcctgagcattgtatatataggtataatgcccaaatgtacaaattctagataaaaacaaaaataaaaaggctttttattttcagtttttgtgcaaatattcgtagtattgcgtaaaatatctaaagaatagaaagtaatgaagcgagatattcagcgtatcatgctggctacagcggtgccgttgttcctaatttttatcctatttctgctaaagatcgttgaagtcggcatggactgggacttctctcacatgggaatataccctctggaaaagcgaggaataacgggtattctgactcatccgctgatacacagcgggttcagccatttgctggccaatacgttgccgctattttttttatcatggtgcttgttctatttctacagggggatagccggacgtatttttatgatcatctggatcggagccggactgctgaccttcattatcggcaaaccgggatggcacatcggtgccagcggactgatttacggacttgccttctttctttttttcagtggtatcctgcggaaatatgttcctctgattgccatctcactgcttgtcacctttttgtatggaggaatcatctggcatatgttcccctacttctctcccgccaacatgtcatgggaaggacatctcagcggaggaatcatgggaacactctgtgcattcggtttcttgaatcacgggcctcaacgaccagaaccttttgcggacgaaacggatgaagaagaagaggaatctccggaagaagatatcaacaatacaaccgactctacggatattacctcataaatcccggttacgacttatgcaatgcctcaatcagcaaggtgatattagcagtaaacaaccttactgagatagcgagcaggatgataccgaaaaacttacggatgatatagatcccccctttcccgaggaaacgttccacacgtccggtcatgcttactacaaagtagacccatagcatattcagtatcaaggcaataataatgttaacactggcatattcggcacgaagcgaaagaagcgtagtaaaagctccggcccctgccagcagcgggaagacaagcggaacgagtgtcgcttcctttatcggcccctgatttttgaagatttctatatccagaatcatttccagagacatgaggaaaataacgaatgcgcccgccacggcgaatgattcgatatctacatgaaaaagtttcagcatcatatcacccgcgtagaagaagcctatcagtaaggcaaaggagatgacagtagcctttgttgcattcacatctttccccttttccttcaggttaataataataggtatagaaccgataatatctattactgcaaaaagtacgataaacgcactgatcatttgctgccaattaaaacccgtgaacataattcctccttttttttgcaaatatactctatttttatgcattcaaacaataaaaaaaacaaaaagaaaggggatatgtggatagcagtgttgtattatgagtaaatttgtacgattaataagagattacaacgtatggaaacaatgttcgatactttgctccaattacctttatttcaggggctttgtcatgaagatttcactagtattctggataaagtcaagctgcactttatcaaacataaagctggggaaaccatcataaagagtggtaatccctgtacccagctttgttttctgttgaaaggtgagatttctattgtcaccaatgcaaaagaaaacatttatacggtcatcgaacaaatcgaagctccctatctgatagaacctcagtctttattcggtatgaataccaactatgcttcttcttatgtggcacatacggaagtgcatactgtttgtatcagcaaagcattcgtactcagtgatctgttcagatatgatattttccgcctcaactatatgaatatcgtcagcaaccgggcgcaaaatctctattcccgtttatgggatgaacccacgctggatttaaaaagcaaaattatccgtttctttctgtcacattgcgaaaaaccgcaaggggaaaagactttcaaagtaaagatggacgatttggcgcgttgtttggatgatactcgattaaatatttctaaaacactgaatgaactacaggataatggtttaatcgagttgcacagaaaagagattctgattccggatgctcaaaaactactttaagagattgacagtttgggtagaacaatctaatatatataaggtagaaaaaagtcaaaagaacagtcttctaattattttcaaaggaaaaatcgacctaattatttaaattaattgcattacttttcatcctggagagcaatagagaccttatgccaaattgaataattttgaagaagtcgtaataggacttggtatttttataccccaaagtatattttctactgtttccataggctattcaaaggttattaagtgcatgtactattctaagacggtgtaaagttattaataaaatcgaaaaatacaatatcttttttattttaattatcaacaaacaccatttttttagaatctcaattctactatatagttcataaattgtcatcccaagcattcatcaaccaattaatcaattatatataagacacttatatacacacataccaagtcctattacgacttagccccaattaatcaatatgattacaaccttaaattaacatttatgaaaactcttagcaacagccctccgcctttcaaaatcggagaatttgatctcattttttacttttatttcagcacagatcagaataggtatgatatgtattctgaattcattatcaacttcaatacccccaatttaagaagatgaataatagcagtcaaacacacccatatattttcaaacttactcatacatacaaaaacaaacgtataccccttgtatgcataccctagttctacccacatagtagacacacaagagtaggttttcctatcactttttttttaaccaatctaattattaaccttttatcacagaaaaacaatgcgaaaaagaagagtttattggacgctgttcattacagctttcgcgtggttagcttcctgttcagatgacgacatcaatggaagcagcgggttcaacccaaaccagcctattgagattacagaattttatcctgattccggaggtatagccactccgatgatcatcgaaggccgcaacttcggtacagacaccactggcatgaaagtctattttgaagatgtagacgggatcagacatcctgccggattagtcagcagtaacggtagcagaatctatgcatttgttcccaaaggactcaccttcaaaagagagatgaatattcttgtagaaagaagaacgcccgacggtcaagaatacataggcaaagcaccagaccaattcctatacaagacacaaaccagtgttagtacggtagcaggacttgcatcaccggacaataatataaacaccgttggtggtgaccttgccacatgtactttctcctctcctttctatctctgtatagacggtgaagacaatatatttgtggtagaccgtaaaggagacagtggaaaagacaaacaaccaaacacaacctgccgtaatgaaaaaggtgaaggcgtaaacggaaacatttcaatgatttccatcgccagcaactcttccattgtattaaaatatggaactgcatatattaatgcaccggcttattctgatgaaaaagatgctgaagctgtttacattccggatgatgccggcatgaaatattatgatatgcaaaaacttctaaattatgttccccgatatagaacagtcttgaaatcagaagaactcagcactgtagacgaaaacaactggaagcattgctttgtaatcaacaagctggatcatatgatctatacggtcatgtggaaagggcaattggttcgaatcaatcctaaaaaccgtacagcagaaattttgctaaagaaaatatctaatgtagcaacaggcgacggcggcaaagcaggaagtgactcctatatcgcattcagccctattaaaggagaagaaaacgtactctatgtatctcttgcagattttcaccagatttggagagtggacgtatccaagatcactccggaagataaagacacttataacggagaatcatacgcaggaaaagcaatctacgaaggagttatgaacgggaagggctgggaagacggcttgctgaagaacgccaaattcagacacccgcgccagatttgtttcaccgacgacggaaaaatgtacattgctgacagtggtaattcctgcatccgcgtaatagatactactatgccgaaagaaagagcagccgtaaccacacctatcggtctgccgggagcggaaggttataaggatggaggtccggaaattgccaaattccacttcccttgcggagtagcagtcaacagtgatggaactattgtatatgtagccgacacacagaacaaagtgattcgtaaattatccattgaataaccttatacaaaatacaatatgagaaataattttctactgattgtactgatcatggcgcttataccgctgacgagttacagtcaagacaataagaaaaaacagtttactgtagcgggggtcgtaatagacaaaaccggtgaaccgctaccgggtactaccatttatgttaagaatgcaccgggagtgggaacctcagcagatatggatggtaaattcagtatcaaagtagatgccaaccaaatattagtcattcaggctattggaatgaaatctatcgagaaactggtgactaaagatgaaatgacactcaaagttacattggaagaagatgacaccaagcttgacgaagtagtggtcacaggtatgacttcacaaaaaaagatatcagtagtaggtgcaatcagtaccattgatgtagcccagctcagtactcccggtacttccctcaacaacatgatcggcggacggttggctggtgtcatcaccatgcagagttcgggcgaaccgggaaaaaacatctccaacttctggattcgtggtatcagtactttcggagccagctccggtgcattagtgctgattgacggtatcgaaggccgccttgaagacattgatcctgatgatgtaaaatcgttcagtatcctgaaagacgcctccgccaccgcagtgtatggtacccgaggtgccaatggcgtggtcttggttaccactaaacgtggagaaacaggcaaacttaccatcacaggacgagcaacattaaaagtatcgcacatcaaacgtctgcccgaatacctgggagcttatgactacgctctccttgccaatgaggcacgtgccatgtcgggtgaagacgacctttactcccgtctggaactggatctgataaaatacaatttggataaagacctctacccggatgttaactggatagatgaaataatgaaacgcacatctatccagcagaattattacatcaatgcacaaggaggaggcgacatagccagatattatctttcattagggtatcaggatgaaggagcggcctaccggcaggaagacaacctgttcaaaaagcctttgtcatataaaaaaataacctatcgtgccaatattgacatgaatctgaccaaaacaaccaaagtttattttggtctggacggatatatttccaactataccagcccgggtggacaaaacacgaatacggtatggtcagcagtccgtcagctaactccactgatgtttcctaaaacctattcagacggtaccttcccttcttatggaaaacatgaccttgcttctccgtatgtcatgctaaataacaccggatacacgcaagatgaaactcagcgtaatatgcttacactcaaacttgaacaggaattcggaggattcctgaaaggaatgacagcgtcggtacaagcgatgagcgaaaatatcaattatttcaatgaaggacgttacatatggcctgacctctaccgcgctacaggaagaagttcacaaggggtactcatcaaaacattgcgtactgccaaagagaacatgaaatatacacaaaataacaacagatacagaaaatactacatggaagccaaagccaactgggaccgtacatttggtttgcactcactaggagcattggctttatattacatggaagatgttcataacacccaatgggactatgacgcaatgggtattaatgccattcctcaacgacgtcaaaacttatcaggacgtgtttcctatggctataacaattgctatttcattgatgcaaacttcggttatacaggttctgcgcaattcgaaaaaggaaaaagattcggtttcttcccttccattgctgtaggctgggtaccgacatcctataactgggtcaatgaggccattccctggttaagcttcctcaagttccgcggctcctacggtcaggtaggtaatgaccagatcagtggtgaccggttcccttatttgacattaatcaatgacaatgccgcctcttactggggatatcgtgaacggggtattacagaaactgtgaaaggagccgacaaccttcaatgggaagtagcaaagaaactcaactttggtatcgatgccaagttcttccacgacaagctctctgtcactgttgactttttccgcgatacacgtgatcacatcttccaggatcgtgtgacgctgcctaagtttgtaggtatggttaccgtcccgaaatcaaatgtaggaaaaatgcatagctatggttctgacggaaacttcgaattcttccaccagatcaataaagacatgagcttcactgtacgcggcaattacactttctctcagaatattattgattactatgaagaaaacaagttaccttatgattatctgagtgtaaccggaaaaccctttaacatccttcgcggatatattgcagaaggtctcttctccagtaaagaagaaatcaacacaagtgccgaccaaagcggattcggccgcattcgtccgggagatatcaaatatcgtgacgtaaatggagacggtattatcaatgacgatgacaaagtacctttgtcctattccaaccaactcccccgggtaatgtatgggttcggagccgattttcactggaaagacttaaccctcagcttccttttcaaaggttcggcaaaagtagactactaccgttcgggactcggtaatgacgcaggatggattcccttctataacggagaactcggcaacgttatcaagctggccaacaatcccaagaacagatggacgcccgcatggtattcaggcaccaccgctacggaaaatccccatgcagaattcccacgtctctcctacggaggcaatacgaacaactcccagctttcctctttctggaaacggaacggttctttcctgcgctttcaggaactcagtctgaagtacaacctgaagactccatggataaaaaagacaggactatcttctgtcgatctggagtttgttgccaacaacctttttactatcgacaaagtgaagtattttgatccggaacaggcatctgcaaacggggccgcttatccgataccggcaacttacacgttccaggtttatcttaaattctaaaaataatatagaacactcatgaaaaagttattcaaaataatattgggagcaacagtaggaagtacactactactcagttcctgcaattttctggatgtagacccatacttcgaagctactttcaaagaagactccatctttcacagcaagaaaaatgctgaaggttatctctggaacactccgaaaggttttcccgacgcaggggctatctggggaaattcctggaatccgggggaatctgcttcggacgaaataacacttaaatatcagacaaatgaattttggggactacaattttccgtaggtaccatcaacagcagaaatctgcctatccaaaaccaatggtacgacatgtatgtcattgtagcaagatgtaacaaaatgcttaaagaagtctacaatgtacctgatatgaacgaaatggacagaagacgttatatcggatatgttcactttatgcgtgggtacgcttattatcatcttttgatgaactggggaccgttgattatcgtgggcgatgaagaactgagcacctccgaacctgccgaatattataatcgcgaacgggctacctatgatgagtctgtagattatatatgcgatgaattccgcctggcaactcaaggcatctattcggcggatgagcaaagcgtcaactattatcaacgtccgaccaaaggagcagccatggcactcatcgcccgtttgcgcctcttccaggcttcaccgcttttcaatggcggagctgcagcccgtaaatgtttcgggacctggaaacgtaaaagcgacggagcctactatgtcaatcaagagtatgacccgagacgctgggccgttgcagcagctgccgccaaacagctgaccaaaatgggatacgagctacatacagtggaagcagatgcccagaacccatatcctctggcctccaatgtccctactgctaacttccctgacggagcaggcaatatcgatccttatcactcttactccgacatgttcacaggagaaggtatcatacagactaataaagaattcatctgggcgatggaatccagtaacgtcactaactatacccatcactcattccctgtcaagtttggcggatggggttcaatgtctgtgccgcagagggtaattgattgctatctgatggcagatgggcggactattcataattcatcggcagaatatccatatgaaccggacttcagcagactcaccggcgaatccaaaaaactagggacatacctactgagggaaaacgtacctatgatgtacgccaatcgttcggcacgcttctatgcctcgataggttttccgggtcgctactggccgatgagttcagcttctaccgacgcctcctacgtcaatcagcaattctggtattctcacgatgataccaatgccggaattgccggtgccggaaataacgtaaacgactacagtgtcagcggttatgttcccgtcaaatacattcatccggacgactcatgggctaacggcaaagggagtgtaaaaggcgcattcgtcaccagccctaaaccgttccctatcattcgttatggtgaagtgctactggaatatgtagaagcattgaaccgtgtagaaggtacagtgaccgtagaagtatccgacaatacaggtacacttattgaggaaaccgttagccgtgatccggcagaaatggctaaatatttcaacatgatacgttatcgcgtcggcttgccgggagtagatgccaacgacatggcagaagcagacaattttgaaaaaatcatccgtaatgaacgtcaggtagagctctttaacgaaggataccgatatttcgatacgcgcaggtggggaacctatctggacgaagatgccaacagctccaactggcggggactggatgtgacaaaagaccgtacaaatgccaacggtaatgaaggattctggaatattgtgacgatcaatacacaaaatgtgcgagaccgcattgcactgcctaaaatggtattcttaccgatccgccatgatgaattgctgaaggttcccaatgccgaccagaatttcggatgggacagataatatcaaaacatgaataacagactgaatatgaaaaagaaatttaatataatgctctgcacccttataggtgtattgagtgcttgcaatgaatacgatttcgaccaggaacaataccggaacgaagtaggcttactcagtaattcgagtctgatctacgaccggcaggtggctaatgtaggacaagaaaaagatacgatctatctggttgccacggttagcggctcacaaataagccctaacacacaccatgtagctcttttggaatcggactctttgctgaaagcatacaacaaatccaactttgatatagaaaaagaaaaatttgccaaactgcttcccgatgaatgctatgattttcccaataaggaactggatattcaggtaggcacttccaaagtaatgtttccgatctatctgaaaaatctggaaaggatttcaccggattccatttattttctggattacaagatagatccggaaaaaacacctaattataatccggataaaagtcatgtattattgcgtatctataaagaaaactattacgcaacgacaaagacttctacctactacaattatacaagcagtacgattgtaattcctaaccccagtggtagtcccgaagtccgtagaccgacaaatgccaatcaagtattcccgatcggtgccaattcggtacgcatgatggcaggtgatgaagatcttggcgattataagacagcaagaagcagaattgtatctaagagtatcattctggaaattggcgagcagcaaccggagaatcctcaggccagagaacttaccatcagagcgcatgacagagttaatgatgtggaagtggatccggtcgatgtagtacaacttactccaatcgatgattacgacaacacattcctgttaaacgctatccgtactcccgacggacgtgccacttattacaaagagttccgtctgcattataaatatcgcctggaatccaccgccccttaccgggaagtgaaagccaaactacgatatgaatttaacccaagagtagataacttgtaatcaaatcaaatgagtatgaaaaaaaatatattaatcatcgggctcgcaagcatattcggaattgcttccggacttatctcttgttcgcccgattacgaaaccgagtttaaagtagaaacgctcgtagttcctgataaaagtcaggcacctatcactttcccacttctgggaggagaacatgaaattgaagtgcagaccaatgtaccactcgacagatggagtgcccagtccaatgcagaatggtgcaaggtagtacaacacgagggcaaagtagtcgtatctgccagtgcaaacaatatatacaaacaacgccgggcagaaatcactgtagcctatggtcatcaaagctattccatcactgtctcgcagtttggtaaagaaccggccatccttataggtgacaagctacaacaggaaggatatgtagaaataatagatgcagaaagagaaacattgacaattcctgtagcgaccaacctgaatctggataatatcattataccagacacttgcaactggatacgtctggcagagcaacctgccacatttgatgcaaagacgcgtgcagcggaagacgtaaacaaacaggaactgaaatttacgctggataaaagcaccgagactgacgtacgttattgtacgattatcctccagtcttcccagaattacagctatacagcttctttcctgataaagcaacaacccagaggttatatagtcgaaatcgatgaagacaagaagatctatgaagtgaaagcaatgggagaaacaatcactattcctttcaaagtaaattctcctgccggtgaagtgtcatatacctatgaagtcgaagaatccgcccaatcctggatcactccagtatcattacccgcttcaagagcactgcgtgatgtctccgaaagctttatcattaaagccaacactgaagttgagaatcaacctcgtgaaggaaagataaccttcaagagtaccaatagcaccgacaaagtaccaagtcagttcgtagtcacagtaaaacaggccggatttatcgcgacacctcctttaaatgtgatcaatgctactgctactccgggagccggaagtattcagctgcaatgggagatacctgaagatgtagacttcaacaagataaagattacctattacgataaagtcacgaaagaaaataaagagatcttaataaatgactataagacaacatcctatatcatagatgatacttaccaatgtgcaggtgaatactcatttactatcaacacctatggtccgactggtatggagacagatagtccggtaacaataacaggcatttccggcgaagcttccgaaatggaacgtgttactcttactatcgatatgctttccgacaatgctaatcatgtcggagacggaggcggtttaccggcattgattgacgggaaggtgaatacttattatcataccaagtggaatgctcctgttacaacagaagcacattatgtccagatcaaactgaacaagccattaaaggacctttgttttgaatatgatgcacgtcaaagcggagtgaataacggaggtgacgtaaaagccgcaacaatatatggaagtatgaacggtgagttctttgaaagtatgggtaatgaagaattcaatctgccgacaacaaacggtggccatgccacagctaaaaacaatgtgagtggaaagcaagcttacaactatatccgatttactcctacggctcgccgtgacaaagatccattggattatactgtcgcaggcagcgcatggtggaatatgtccgaaatatacctttacagaataagacatgatgaagcctgggcaagagagcagctaggcatttaacaaaacaagaaaagactgacgaagaacaaaataagatcagattagacacattttcttatcgagttcttcgccagtcttactttttataaaattggatgataagaattatgaatatgaaacccaagaaattaagcctcttattaactatcttgccaatgattattgcagctacaggttgccattcccggcaagagtctaaagcagacatcactcctcattgtatcaatcttcaggcagacagcctctaccaacaagcaatagccctgatggaatcttcctatgatgtagactccacccgaaaatgcatccgctttctggacaaagctttggcaatcgacagtttaaatcctgactattacggcatgaaagccaaacttttatctgaaatgggagaactggactccgccctatacatacaaacacttgctatggagaaaaacgcaattaccggtgagtatctgttccaactgggactacttcaagctgccaaagatatgcacgctgaagcccacgaaagctttggaaaaagcaaggttttccttcaagcagtactaaaacaatatcccgacagcttgggagcttttatcctggcagaagccgccaattctctctacgaaaataaagattcacttttcatgagaaatatagatgaaatccgtaaacgctttcccgaaaggttgctggaaatagagatgacccgaagggtgaaaccgcattcattggtcaatcaaataagaaggattcaaatagaaaaggattataatattgattttgatatggatagtctcgttgaggcgactgtagcgaaataacttttttccaaatgaaaaatgacagcacttttgccctcacgctctcattcccgcttcaatccccctattcatcggagttacagcgattagagatccaatggtagcagcgtgagagcaaccgtttgccctcacgttgctaccaatcattctattttcagcaaatgataaagtgtccccttaccggacttccggcagggaatattcagcttctgaagcgcacggccgaacacagctaccttattgatagccaacctgtcccgtgtcttcgtctgcaaataattcagaatctgcatggacgtcatccattcgcctccctcctcttcttccgccggacggagataacaatggaacaactgttccaacgggctcgcctgctcaaattcacggttcgtctgcttcaaaatcttttcatcctcatcatccagccagtaacgctcacccttataaatggcttccatcgcctgagcataaagctgtttgtaattgatggtagcattggttttgataggagctatcacctcaatacagataaaacgacggctgccactgggatcggcaagcaaatctttctgattgctggtgccgataaaggaagcataacgacgcatttcacgaatagtattgccatgaggcttgcgcaagttagcaacaggcttttgcaacaaatgcttcagaaacccctgctggctgacattgatctgatcaaactcatcaatgttgatcagaaaaaaacgtcctaaataacgctccgcttcctgcttactcttgaaatcgatactgtccgtatagccgaaacgcaactcaggcggcagaataatccggcaaaacgttgacttacgatacccttgcggaccgacaagcaaaggtgacgtactgtttccatgctgccgatccacccctctccaatgcgccaccatgctcagaaaccaacgataaaacaactcctgccagtacggattcgtacaaggaaccaatcctgccaatgcacggatacggtctttcccgtcccaacggccgacatcataaagatattcttctacaggattgtgcaaaggaacatattccgaattcagaaaacggtctacatcacgatcccaggcattgatgccttctttcaaggcacagatagagatactgttgcgcacacgtttgtccacgggcttaaagtaaaagtggatggaatcacgctggcggtattccagatcatctaacacggtgttataacgaaattcataacgacggttcataaattcttccagcagaaaagccgtctcctgctcccttccgatactgtttttcttgccaaaacccttacattcctgataaagattatgaatcgtcgagcgtatgattcgctcatcctcttcccgatagtaatgaatgagtgtctgccggaccgcttcttcttcggggatacccgctttgaaacaatgctcggcaaggtgtacaagcaaaggttgcaaatcatctccacgcttccagtcttccatttcctgaaatgccctgttcaacgccgcttcataaatcttcgtgaaagtttttgcagactcatatcccggtttcaatcgcaacaacagattcttttcaccctgcttgcgctgccggaaagtttcttcaccgggcatagcgagcggttgttccagacagaacggcactgcatcgggattgtaatatggagattcgtccagtgtcatgcgacacttctgtgtcagcaccggtgcttgcagattaatatcataaggaagcatcggctggtagcactttaccgccagccagtaggcatgagcatgaaataattccgcttccgcttctttttcgggcagtcctctgtcatccggcagggcaaaacgcacccatatcttcacgctacggccactggaaccacagaatgcggcgaaagtctgaggcaagagtgccgcctgccgtttcacatattccatttcggacgggcctgccagccggttcacttccaactgcaccagtccgttatattgtttcatttttcgttcgccttctttagtgcgggtacattctacggcagaatagatatatggcagtttgtctatatgttcgtactggctgtacgtaccttccagcatcggtatcaggtttcgcaaagccgtaatgtgtcccgattttgtctccgttttcattttgttgaataatgtacctgcttcgcatatgcttagagcttcttttccactcccgctgtcttgtctgattaaagttattttcattcttttttgtctgtttatctaccaatattgtttatcgcttaattcctgtaaaggtacgatattatattacggcatacaaacttttcctctaataaaaacagactttttgctcgcattaaccttataataaaatacgacatcaatcacacgtagatggttcatttcttaccatgatttccctatatcattgtatctgaatggcttacagtttcctttaatttcttattttggaaacgagcgttccctatatcggaaacgctcgtttcctgccttggaactggcgttcccttataagggaacgccagtttcccaagcaggaatgatgtgtactggttttagttgacaacttcgtttgttataactgaattagtttactcaatatactttaatatctaaataggtttacttttgttattcttattcctatgttagttgtcttttgttggtgcttgcaaatttatgcatcttcctttatttacgcaagccttcttcaggaaaatgtaatgttgccaacaaccaaaaactcttcggtcggggatcgccctagcggcaaggggcgggaccacccgtcccgacgagcgggtattatgctgttaatcctcccgtttcgctgaccacttccataggtgtcctcatgtttatcccttgatgaggccgcacatgattatatacatatacagcatcttcaatgcgcttgcttacttgctcgaagctctcatcatcacagtcgaatagccaaccgtttttaatggtgttgttcattctttcagccaatgcattatgtaaaggatcaccacactgcgtcatactgatgttgatttgatgctctttaagcctctctacatatttatttgagcaatattggacaccccggtcggaatgatgaataagagtgctcatgtctatgtgatacttctcatagaatgatattgccatctccaaagctttcaagggcccctccgtctcaagagttttgtaaagcgcatatcccacgatggcacgacttgacgcatcggtaagcaacgagaggtaagcccagccctgaccggtgtttacgtaggttatatccgccactaccatagcgcccaatcttgtagcgacaaatttgggtgcaacattcaacagatcggggtagatatagtaattatggttcgaattcgttgttttaggacgcttgcgacttgtacgttgacacaaaccattggagcgaaaaatgtcatagcaacgatcacgaccgataaccatctttggtccaaacttactcacgcagcaggcgtataactcgcgcataccagctttgggcatgagttccaacagttctttgcagtacaacacgatgcttgtggtaaggatatcaacctccaaatgtcggttcacatgcttgtaataaccttgtcgggttatgccgaagtaatcacagaggaactttatacaaccacgtttgcgtcggggtgagtgcctctgtgacaaggtgtcgattacttggcatcggagttttttcgtaccttgatatgatacgtggattcagcaagattgatgagttcttcgcacgcctcgtgacgtaaactctcatcagcaagagcccgatgaagtttacggttctcagcacgcaatagcgatagttctttctggagctcagaaatactagaatcaatagcatcgctatttactggtttagaggatctacccatatctttgtcttctatttgatacttgttaagccaataagtaagaagcttggcacaaaagccgttacgcttacaaaactcagatttgctctcgggacttgataaatactcacgaatataagacattcgttcatcatcactgtaatagttgtactgctttttcgaatatttcatctttattttcgatttttgaagtgtcaacttattcagtacactacattcccaagcaggaaactggcgcttgacttatatgattggattgatttgaccgcatgaaatgtttcaatcaacctgatctttcaggaagcattcaatcatatatcggtcaataatgcgtgagttatcagctattaacacctgatttctcagttattaatggctgaaatgccaatcgttaatagttgacacttcagacattaatactctgtaaatcaaataatagcagcaaaaaacaacatataatgcgacgaaactgagtgagagcaaccgtttgctctcatacttgccaccacacttgctaccacgcccgaaaccacgatgaataaagggatacagacggactgttagagcatgagggcaaaagtcgtgttgaattcctatggagcgtaaatttgagtatgagctttatttagtccgataccttaaattatcaaacaggcgttctatcaatcgtctgtcttttacaataatatcggcagttcctcccaactcatatttaaagtcgagagtctcttcataattagttgttaatccgttgggcaattcaacgttaatcaaatatgtttcaatggtcttttctcctgttttctgcgtttgggtgaccaaagaaatagaagatacatatccctctatatatccatactccatgtagggatagttctctaacttaataacgactttactgttttcttttacctttccggctccattggccggaagcagcacctgaccatatatatggttttccttgggtatcactccaaataccgcttctcctgcctgcacaaattgaccatctgaaataaatttcaggaactctacttttccatcaaaaggagctttgaaaacatatttctgttcccatgcggccatatttgctatcaagttctgatgagtggacaaaagttccactttcagttcccgttctttctccagttgttccacttccagttgctccagccgatggtatgcttctgtgatttgcatgcgggtcgaggcaatctccctatttatgttttgtacctcctgtactgttgtcaggtaattatttttaatctgatcggtctcatattcataagtcgctatttcctgctgatcaagagagacataacgtttaagccatttccgggcaacatccattctatcttttgcagctttctgcgagtcctccgcttctcggacaatcttctttttccattcaatgctcgtcgtgatattctctctttgcttttcgtagacattctgctgcagatagtcacattgagctttcagagctgcaagaaaggcatagtattgagggttgatttctcctaaatataccttgtcgggaaatgtatctttaagagcaagcaaatgggtgccatcgaaatctattcgatttattaaatccgcaatcttccgcacatcctctgtagaagcaggattttgcacgaccgctatatattcccccttcttcacctcctcctgtgctttgtgcgaaagaagcagcaaattccccgtactgttggcaacaagccttacggtcgggttctgcgcattaattttaatttgcccggtcaccatatccgggtatttgataatccatccgaacaatagaaataatgctgcaaatacaatgaccgccagtgccacccattttccgaaagccatgggcatccggtcaataatctcatccagttcttcgcttcttccggatgatttagtctgcgctttcttctgtggagaaggtgtttgtttccggttcatattggctttgaattaagttgtaataatactgtttgtttgtcatcaggctttgatgattgcctgtctctatgatcattcccgcttttaatacgatgatttggtctgccctgcgaatcgtacttagccgatgagctaccacaatgactgtcctgtttttgaaaacgttatttaatgcccttactatcttttgctcattaatcgtatcaagtgcattggtagcttcgtccagaaacagatagtccggatccttgtagagcgctcttgctatcagtacacgctgccgttgccctccactcaaacctctgcccatttctccgatcattgtctggtatccctgcggcatagcttctatctcgtggctgatattggctacttcaacagccttctgcaatgcctcataatcaatattggcatcatccagtacaatattgttctgtatggtgtcattaaacaatttcccgtcctgcatcacgcagccgcatttagcacgccaattgcgaagactgatattattcacgttcatatctcccatacagatttctccgtaagaaggcatgtatagacgcaacaacagtttgagtaaagtagatttgccgcatccgctgtctccgacaatagcggtcacttttcctttaggaatctgcaaggtgatgtttttcaaaaccagcggagcatttctcgaatactgaaatgatacgttcttcagatataaacttttgtctacaggcaaactcagactgttgcttatcacaggcgaagaatcgtcttcatctttcagctgatgaatttcattgatacgcataaagctgattttagcatactgggcagattgtataaaactgactaactgtgccacaggtccgttcagcatccctataataaattgcgttgagatcatgactccgaaagtgatatctccattgataacggcgatggcacagtagaacgtgacggcaatattcatcatactattgataaattgcgccccaagcgactgtgcattattgattttcagcactttcagattcaaccggtatatccttgcctgtatagcttcccatttccagcgtttaaggtcttcgtaattgtttattttaatctcctgaacattttcgatggtttccacccagtaactttggttcttggcattcagttcgaaatactcccagtcgagctttttacgtatgctcaaaaaggtgaaaatccatgctacataaatcccactgcccgctataaaaataaaaaagatcataggattataaatcaacagtataatgctgaatacaacgaatgtaatgatagagaagaacatccccaaggagttgttcatcacaaagctgcgtattctttcatgatcgcccgcccgttgaaggatatcaccgaccagtttgttttcgaagaaagtcaccggtaatttcattaatttgatcagatagtccgatatgagggagatattgacacgggtagaaacgtgcagcaagacccagtctcttaatacatttgacagcgttatactaagtaaaagaacaatattgccgattagcatcatgtagatgaaagatatatcctgagtatatatacctatatctattacagattttgagataaacggaagtactgcttgcagtccggtggctatcaacatgatagcgaacaatatgccgaatgcttttttatatggcgtaaaatagttgagaaggttttcgaaacttttgaatctttcgatccgttcatgagcttctatttgcttgaagtttgccataggctccagtaccatcagcatcccgaattcttccccttccttataccatctgtctttgaaatcctcttccggataggaaagcaagcctttggcaggatcggacacatatatcttccctttttttgttttatacacaactatgaagtggtgctggtcccagtgtatgatacatggcagtggaatcctgttggtcagattctccatagtcgccttaaccgctacagttcttagccctattttttcggcagcatagctaatatccaaaaaggaaactccttctctggttatcccacataaatccctcaaatattgcaacgaatagtatttgccgtagtattttgctatcattttgatacatgctgggccacagtcttttgcatccatttggtactcccaggggaattgtcttgtttgcataaaaaaaaaattatatttcttgcaaagatgcgaaatttatttctatatttgcagaatcacacaaataaaatttaatacttatgaagcaaaaattaacaagagcactcattgatgagattcggaaagagatgccagtactgacagaaatggaaatgagatgttgcaacggtggagatggtggaactacaagttgggattgtttattcaattgcatgcaccatatggatccctcccgatctgcgcaagattatgctaatgattataaagatatttatggtcttgatcctacagcaatgggaggagttcccaatgaattaattggaaatgtccttagcgttatgggatttggtaatacagttccaggttcaatgacttctaacagagactattatcaagttgcaactatggtaaatcctgatggcacaggacatactattatagtctttgcagtaccagatgaaaacggaaaaatctcttattttgacccaaccctagagggggaagatgggaaaaaggtaagaaaagtggacatttcggatatatccacaatatatcgaataaaaaaagccgacattgatactaccattggtgctcatgaggaaagctacggctatgcctatggttattttggttatggtaattacgaagatagttatggctatggtaatagttattacgggaattataattatgaaaatattagtgactacaatggtactgctaacagtgattacagttactataattaatactacaattaataaaaagctatgcgagttctgcaagatttagtcttgttatcattattacttttgagtatatcaaaagtatattctcaagaagataaaaaaactaaagaattattcaattctggtggatatatatctgatggatatgcattggatagaaaccaagtacgatttaatcagtccagcgattttgtattccattatattcccggcggtgatcgattaacatgcattacttcaaaacaagttagagactacaatcgacattataattgtatactatcaaaagacagtaattttattgcatacgtatctgtgcctcccatattttgcggggataaagattccatttatgctgactttagttttaaaacaggatttatgattgaagtgaatacttatcatttagaaataatcaaaggagatttttttgtaaatacaggggaaagagtgacctctttatgcgaccttcctctcacttataaatctttaaaatatgctcgtaaagcatataatgcggatactgtaattacatatcctttaagaatgtgggaaaatttagaaaataagtataatcattgccaagtaatgattattcaaaaaaaacgtcgcggatgtattgctctgtattgcttttataatgacaaaggtgctagaaaattaagtcaatatataagatcattaaaaaaggtattttggtatagagagcctaaagattatattgaagtaatagatccaccaatcatagaagaatacgaaatacctcatttaaaagctaaagaaaagtccgctgataattaagatgcaaataagatggggatttatcccatcgtttctatatttgtgaaatcacaaaactaaaatcaaacacttatgaaacaaaaattaacaagggcacttattgatgaaattcgaaaagaaatgcctgtattgagtcaaaatgaagaaaaaggagtaatcggaggtactttatatgtaattggagtggatgggcgtgtactttactctaacgaaacaaatacagatgaggttcttgtatcaatgggatcatgggatggggctccaacaatggaattgcctaaaggtacatcttttcaaatatcttctggtcaattggttattgaaggtactagtgaacagaatcgagatatctatagttttttaactcaaaatacttctgtagaatggtctatgtgcgtggatagttcaacttatcattttttcgcaggtaccaatcatcaagaaaaagaagtgtcaatggcgtatagtggatgtgatataaaatatcataaccatcagagtgaatatgctaactatccaagtgatgcagactatgaaacaaagagtaaattacaagaaattggatataaagaattttatatttatcatgagccaactgatacctatattccatattgagaacaacaattatgaaaaatagaattatatcacttttcatatatttattgcctagtttaatctatgctcaaaataatgcagacgacaaatatgagattctgtctctaactgacatgtttagtcttttcaaagatagtaaaaatagtgttcctcaagattatgacgaaatatatgttcccggttacttctatgagccttcttttatgtatccttcacctttaaagaaagaattttgttgtgtagctcaatggagaatcccaaacagaaactgtaagtatctatttttagaagatatatttccgcaaaacaaagattccttaaaacaagcttctcttgaattacaaaaaataaaagagaaatatggaatgagagaatcagctatgtatcaagatgtgcccgcaggttataatggtataattgccaaatggttcactggtagattattcgttttgcattgcccaagaaagctatttaatacagttgtatcaaagaaagcttcactcatatccattcataaaggtaggatatctgacgaaaaacaaataactccagatgagggtaagtttgaatcttcttgttttccacaaaaaggaggcatgatattaatacgcgaagacggatgttggtatgatgacattaaaaggaatatagattttttaatctctcccctaattaatgaaaattttcctacagaatttagcaaacatgttgggagggaatattcatttctattggaagtagtccctaaaacaggacaaattattccacacctcttattgccgaaaacattatctaccgacgagaaaatgattgtatcttatttagaaaaacaaataaggaagtttcctgaaaacagttttggccccctgataaccattgacaagaaaatgttatatggtcgatatttaaaatttattgtaaaagatgaaaagtttaagattgaagactaccttgaatattgatattaagtcaagaaacaatactaagtcactgatttcgaacactgcttattgaaattgccacaaagaaggactacaaccattctgccatagtacaattcaatattgaagatttccctattaaagcgagttaatataaacgaagtatgaaaaataattttttggtgaactttatattattacatggatattcattagacaactctagtctgatgtttggtaaaatggggtattctttaattcttttcgaatattctcactattttaaggatgctttagctgaaaaacatgcttttgagttattgcaagaggtactagcttctcctatgaaaagcaatacatttaatgaaggaaaaatgggaatagcatggtctcttattcatcttattgaaaaagaatatattgaagctgattatctggaattatatggtcaagaacataaagaaatagtagcattcataaaacaattaaaaacagatatgaacaatattgtatctaaaaacgacgctatatcgtttttaatagcttctaaatcatatattcaggaatctgattttgatgaaatacttcccaatttaatagagaacctctatgattacctaaaacaaattcctaaaagtttgtttgaacgtaatttgttctattaccatgctacgaaaatgctctgtctctataatctttatgaagaattaagtattcgaggagaaacattaattgacataatagtacaaacacataaaaaattaatcagtgataaacatgtttgtactaatatatcatttggagtcaatcttttgcaatatggtttgtgccataaacgcaaagatatcataaagctggcaaatgcgattataaaatgctacttttcaaatatggttttggaaaccctaaacttaaaagaatcaattgatgctatttacaatctgaataaattacaacttcttaataaagaaagtgaatggacatctttaaagaaacaattgtcaagcctcttgtttaataaagaatcttatttatataaagaaaatcggctgacattaagtagactaaaaggaggaattccccaattgttacttatggaatgtcttaatttccaagatataaaatccaccggacactatataatgctgaaatgatagaaaaaaatgttgtaatcctcagaatagaaactggcaatccatccggtgttgtacgctatattcaaatgttaacagaaggtatgaaacatatgaacggcattaaagttcatattatttgtttaaataccagtctgatctttcccaaatttgaagtgacagaggataggataattgctaatatcccatatccttctaaatccaagcctctgagaaatgaaatatattggcttactaagtattttaacgtcgtatccgacttaatatctccctattttaaaaacaggaaacaattaatttggcatgtgcaagaattattactagtaaaattagcggatattttaaagttatctttaggcggacatattttaacccatttacatatcattccttggaaactaagtcttgaatataatgaaagtctgtttaagaaacagtactctcaatggttgaataacacattcaatttaataaatgaaaatcaactagaaaagattgcatatcctttatctgatagaattatatgtgtttcttattccgcaatgaaacacattatttcagcatatggtatccatccagacaaaatatctgttatatataatggtatggatgatacgggaatcaccttgcaggaaagaaaatctagaacaccagagatccttttcgtaggcagaatcagtcgtgaaaaaggagtgatttgtttacttaatgcattaaataaagtagccagtagagggtatttttgcaaactgaaattagttgggcaatgtaccggatatatgtcatctcatatccgcaaagcatacaaacaactaaagattgacatattagggactgtttcttttaatgagctgaaagaactatatacaacaaatactataggagtcattccttctttacatgaacaatgtagctatgtggctattgaaatgtccatgtttggtatgccaatgatcgtatcagatgtagatgcactttccgaaatgttcgaagatgaagtaaacgctttgagaatccctttagtgtttgatgaagattttggtttagagctagatgaagagaaattagcagacgccatcatccgcttgatagatgatgaagccttaaggctaaaactgagcacaaatgcaatcaagaactaccaagaaagattcactctggaaaagatgatagagaatacgattaatgtatatgaacaattaatagaacaagacaatgcctgaaataacagttctaatgcccgtcagaaatggtgagagatatataaaagaatctattgatagtgttttgaatcaaacactgaccgactttgagtttcttattatagatgatggttcaacagaccggacagtagaaatcattcaaggatatacagacaaaagaatacgtttagtcagaaaggagcatcaatttattcaaaacttaaatgaaggattagagttggcttccggctcttatattgcacgcatggatgccgatgatataatgcatacagaacgattaagaattcaattaaaacgtatgaaaaaaaatccggatattacagtttgtggaacatgggctaagattttcagcgataagggcaacgaaagaaatgtttcccaccttggatatggaatcatacacgaacctgtgttggaattactaaaatacaacatgctacttcatcctagtgtgatgattaaaaaagagtttctgcttaatcaccatattgaatatcaaaattacccctgtgtggaagattataaattgtggtttgatatagcgaaagctggaggaatattatttgtagaaccacaagaactattaatgtttagaagaagtgatacgcaggtcaccgtaacgaagaaaaaggaaatgtctttaggttctatccgtttgagaaaggaaattcttctctatcttctctctatatataataataaaacattaaatagcctattatccgactttgaaaatttagaaaagaataaatggatgtctaatgaagacatttttcgtttttttgtgaatctatttaatagaatacaacgcgatacaatggtttaatctttcaattgaaaattaataaattattttagatagaattagaacaaccatgaatatcgcttttttatcttcatcaaaccctaatgatcaaaataactggtcaggtactctttactctctatacacttcacttcaaaagaaacatagggtgatatgggtaggcgaaactgtgtttgctgaggtttgggaattccacaaagccaatttcaaaaacaatgaaacattctttcctgaaaattatgcgttgctttttggtaaattgttttctgacctattgaaaaaggaatgttatgatgtaattatatgccgagattatttctttgccgcatatctcgtttcggatataccacttatttatattggagatactacatttcatctgtttaatcaatacatgaactggcaggacaaaagtcttaccaaactagccgaacaactggaatcactcgctatacaaaaggtggataaaattatttattgttcggaatgggcaaaacagagcgcaatgcaggattacaatgctgatgccgagaaaatagaagtggttgaatttggagcgaatatcacagagaacatcccgattccagataacgtatcgccgataaatgcaccatgtaacctcttatttatcggaagaaattggaatatgaaaggtggaaataaagtacttgaaatttatcataatctaaaaggaaggggatttcaatgtacgcttactattgtaggaagtgaacctccaatgtccttaccaaatgatccgaatattgaaatatacccttttatcgacaaaacaaactccaatgacaggttaaaattccatgagatcctgacacgatcgcattttctgattctgcccactcgctttgattgttttggaatagttttctgcgaagcatgcgcctatggtattccatcgttaggcactaatgtaggaggtgtatcacaggttatcaaagaacgagaaaatggatttctgttcaacatcgatgcttcttcgctggaatatgctgataaaatagaagagatattcaataaccatataacatattccaaactaaggaaaactgcacgaaaggattttgaagaacgtttaaactgggatatatggctcgataaaagcaataagattatagaacagcttgcatccgagcatcaaccggatttttatcttccggtttatgttatcaatatgagagaaagagtggaacgtaaacaacatattactaaggagttcgacaacaaggaagaattcgagttaaattgggtagaggcttcggcccatcctatcggtgcagtaggtttatggaatagtatgatcaaaatcataaaaatggcaaaagagaaaggagatgacatcattgtcatttgcgaagacgaccattatttcacggaaaattattctcccaaattactgttcaaagaagttacagaagcttatatacaaggagcggaagtactttccggtggtattggaggatttggacaagcgatccctgcaggatatcatcgttataaagttgactggttttggtgcacacagttcattgttatttataatcgtttttttgataagatgctggattattcgtttcagaatactgacacagccgatggagtaatatccaaactagccacaaacataatggttatctatccttttatctcagaacaaaaggattttgggtactcggatgttactcagagtaatatggaacagcagggtaaaataagagagcattttgcaagagcgaataaacacatgaaatcaataagtctgaaataaaagaaagattgatgacaatgataaacttattatttatacaaaataaaatagtctaatggaaaatctcatttttgatataggttttcataaaggagaagatacccttttttatcttttgaaagggtatcgggtaattgctgtggatgctgaccctgatttaataaatgaatggcagaatatttttaagaaatacatagagaatggaaagctattgttgctaaactatgtgatttctgacacaaatgacgtagacaccgatttttatatcggtccaaataccatttggagttcaactaaagtttctatttcttcaagaatgtgctgcaaggctattaaaaagaagattaaatcaaaacggctggaccatttgtttcatgaatacggtactcctttttattgtaaaatagatatagaaggaaatgacatcattgcactgcaaacgatggaaaaagtgagtgagaaacctctatatatatcagtagaaactgaatgcataggagaagatgaagatatagcaggacacgaattggacactttgaatgctttatatcagctaggatatagaaaattcaagttagttgatcaaagaacacttaccgtactcgactataattgtttttataagaataattctgaacataattggttcgaacaaatagaaaccaattgtaagtatgccgaagaactgatagttctctccgatactgatcaacgagtgaaatttaccgatttcttccccggttcttcaggaccatttggagaagaactagccggcaaatggtatgattaccctcaagcaaaggaaatgcttaaaaagcatagagaagacaaaatgagactgaacgaaccggcatggaccttttggtgcgattggcatgcaacgttttaacaaatatagttacacataaaaacaatagaactatgaaaatactacaagcaataaccttgtcagcattattacttttgaatatatcaaaggtatgctctcaagaagataaaaaaactaaagattttttcaattctggtggatatatatctgaaggatatgcattggatagaaaccaagtacgatttaatcagtccagcgattttgtgtttcatcatattcctaacggtaatctaatatgcattacttcaaaacaatttagagcacatgcatttagtcgacattataattgcatactatcaaaagacagtaattttattgcatacgtatctgtgcctcccatattctgcggggataaagattctatttatgctgactttagttttaaaacaggatttatgattgaaatgaatacttatcatttagaaataatcaaaggagatttttttaggaatacaggagaaagggttacttctttgtgtgatcttcctctcatttataaatcttcaaaatatgctcgtaaagcatttaatgcggatactgtaattacatatcctttaagaatgtgggaaaatttagaaaataagtacaatcattgccaagtaatgataattcaaaaaaaacgtcgtggatgtattgctctgtattgcttttataatgacaaaggtgccaaaaagctaagtcactatatcagatcattagaacatgtcttttggtatagagaaccgaaagattacattgaagtaatagatccaccaatcatagatgaatatgaaatacctcatttaaaagctaaagaaagatccgctaataattaagatgcaaaaataagatgggaatttatcctattacttctatctttacagaatcacacaactaaaatttatcagaatgattataatggctacaattattaaagtgtaaaacaatgagaatactacaaacaataatcttatcatcattattacttttgatagcatcgaatgcttatcctcaaaaagataaaagtcttcaaaatgtttttatcccagaaggttatgcactagatagaaatcaagtacagtataatcagcctaaagattttatatcctatatcgattctttaggaaaaaacaaagtttatttaggatgctttcttgcaaaagaatctaagagattaccaagctactatcgcaaatcctttctatccaaagatagtaattttattatactcactgctattcccagtatattttgcagacgcaatgattcagtctatgcagattttgatttgcttccagaaatgaaagttgagatgaatacttatcatttaacccatattaaagcggacttccttaaaaatacgggaaaacgagtcgcttttttatctgaattacctataacttataagtcttccaaatatgcccgtgaatccttcaatgcagatactgttatcacataccctttaaaaatgtgggaaaaatatgaaaataaatatactcattgcttggtcatattaattcaaaaacgatatcgtggttgtatccctctttattgcttatacactgacgaaggagctaagaaactcaaccactatatcaaatcattacaaaaggtgttttggtatagaaatccgaaagattatatcgaagtaatagatcctgtcccagagacagataatatatttattttgccaaagcgaaatgaatcagataccgtacgtatagttggtcaattatgaaaaatagaattatatcacttttcatatatttattgcctggtttgatctatgctcaaaataatgcagacgacaaatatgagattatgtctctaaccgacatgttgaatctttttaaggacagtatcaagacgtaccagcaggttataatggtataattgccgaatggttcactggcaaataccttgaatattgatattgagtcaacaagcaatattaaatcattgattgtctatgcaacaatgcgtttttatttctatatttgtagaatcacacaacttaaatttaatgcatatgaaacagaaattagtacgaataggtattagcgggatacagaaacaaaaagagagattttgccttatatttcctgtactattatttatatttatctttcccgcatcatctattgctcaaactatcgcagaagaatataatttcaattttaagggaggagaagaacaaaagtggtcttggataaagaaccaaaccggatgctttacttatattgaatcaatgcaaataaagaaagatgataatatagtttataaaatatcatatactccacctccatcaaaaaataagaatatgatatttattacatcttgcactatcatgataccagaacagataaatggagatagctgccaagtatctataaaaagtaaaacaagagagataactaatgcatggcttacagttacagctctcaacagtaatgaagtggcagtagcatctgaagacaaaaagctggaacatccggaatggacggataatgtactatcattaaaattgacggacgggaaatataaagcccaagcattacgaattaatatcttttattttggaaatagtaatccggatcaacaaatatgtttaagtgacctgcaaatcaatattgatggaaaagatctggggaaacaatctattgaagatcaaactgtcattaacacaaacattcacaaaagacttatcaaaaataagattataaaattatctcatgacaatgatagtactctgcttacgcgaataaatgaattgaaagataaaaaaatcataggattaggagaatgtactcatggttcgcaagaattaaaaactgcggttattcaattttcaaagaatctcattcaaaatggagattgcaggtttgttctgttagaggctcccgttgatgccttactactggtcgatgcatatatacaaggaattatatcatcacccgacattgaaaaacaaataaaagaaatcatgcagatgttttttacaaacaatagcgagcttatgggctttgtggattggttaaaggagtataacaagacatctcttcgtaaagtacacctatctggtatggattataaagacatcataagtccatatttttatgactacctattaaatctattggataaagaaaaaggacgatactatttattaaaactatatgataaagaatttaaagatatattgcaatatgctcatgaggatgtttatttaaaaacgaagttgggagaagagaatttttcgctttttacccaatacatagaaacttgtatcaatttgggtattggctcccaattgcctcctcctgattatagggatttctatatgtttacttataccaaacaacttgctgatcatttcttaaaaaaagatgagaagctaatcattcacgctcatagtgcccatctttctaacttggaacgttttgatagttttccgtataaagaaatcccagcagggaatcgtttaaagaaatattatggagataagtattactcaattggttttcaagttggaaaaggaacatttactcaggaatccgccggttattttagcaagctgatagcattaccattatccaagccaccatataatagttttgaacatttagctctaagcacaaaagaaagttatttctattatccatccaaatatatggatgacggtattgttgagttattagttattccaagaatggcacgttatcagagacaatatcaatttcattctgtgaaaaactggtgtgatgcctatgtctttatacaagagagcacgccgctcaaaaatgtaacgactggagaattcgaaacaatgttcaaacaatttcttagaataaaggagttgataaaagaattgaaagcaaacgaagaacaatataattaattctgttatgcctctatttacaaaaaaaacaactctatcataaaggattaaagttatgaagaaatttctttttttaagtattctatgctatgcttgtaatgttgtttatgggcagcattatattccagtcaaaaagatgatatctaactataaagagcaaaaagctatcgatactttgaagaatcatgatattatttataatattgaagaatctcctgaagcaggaatatttatggaacaatctctattaccatccgacttacaaagaccaaaagatattcgtgcggaatggtgctttgaatattcttcaggacaaaaggctatgttatacttaaagaaaatatattcatcaaaagaaggaaagtcgaatgaagcatcgatctataagaataagttggctgaaaaatatggaaaagacgatttagggattcctgcaatatggtattcggggaagataacagccttatcgtgtcccaaagacttatttggagaaattgtgacgaagaatgtagctgagtttgacatagaaaagggacaggttatatcacgaaactttttagatattgcaaaaaccggaacgatggaaggtcctcgtcgttctcgtcctactatcaagtattcgcctattgccagtacagatggttgctggtatagtaatcttcaatataaactggatttattagaagagttcgttaatggtaatttgaaaaagcataaaacatcaaccacaaaatttggcgtagatatcttgttggtgacgaataaaaaagggaaaacgaccggatatttattatcacccaatgagatcatgaataaagagaatcaagctctgaccgaacaattaataaaacagatcagcaagttgcctcgttggagttttggatggttacaaacgataaacggttctattttccagggacggtatgtaaaagcaaactattcatcggatacaggatggaagctagaggattatcttcattagaacaaagagtaacttctactcaaaagtaaaagctactcttcattccatataagattggggatattcagtaagtttccctatttatttgctttaatacgttgcccgtccgcctgaacagcgtacagttccgctccttcaatgtctgcttcggcaggtacagtaaatacaaaccgattggcaaaccatacttttttgccacccttgattaattcgaaagcaaccgcctgttcgccattagtcacagtgtatgttcttccggaaacggtataacttacagtcttggtgattttcacattgttctggaatgtttcgaaataccctacatctcctccatcttcggatatacctttttgattgcctccggctcctgcctggtatcttcggtcttcaatgtattcaataggcggacatttagtggaaaatgttttcatataagccagcgtctgattaatcatatcctgtgtcacggtatatgaaaagcttccgtaagcatacaacttgaaactgaccggaataaagaatccccaggcatcgaagaattcggtcatatccatgttagcggcttttgctacgttgcgtgcatacatcagttgcgctgctcccggatcattgaaaggtaaccagaattcaggggtacgtccttgctcgaatatcttacggatggtattcggtttcttgccgatacgttcgaaataggtccacaattgctggttgaggcgcatatgcatttcggaggcttctccttgatataatccatatttattggcatcatcagatgtcatatcctggggggtaaatgccagcgtgttcgggtctcgcggatgcatgaatctgctccaaggagtcggaggcgcataccggtaagtagctaaagtcccaatggagcttccacgtgatccccactggtttatcttgtacaccacataattagaaaagagattattgctcgattccgtagtactgggccagttgatagctccctgatgcatgtgtccgagttcatgtcccggcccccattcattgtcctgattcttgtccatatcacgcggatcgaagttgtttttgaaaccccatccatcttttgtgcttacatcacccgctgccatattaatgtaataattggtagcataaagtccgtcggtgaaagtcgtgacatgcatcagtgaattgaattctcctgtattcgaataagtatcgatggcagccagttcctgctcccaatctatcaggttatcccatcgttccattcctcttactactccatactgtttgaagttgtcctgattttgcagcaagtctttcagtgctgtaaacagaatcttcctacctttcagcacaaatacacatttgtcagatccgtccaaagtgacagattttgccttccggatatattcacggaacagatcatcggttttatccacagtcagatcccatacattgaagcctacacgcgcatgttccgttatctccacatactggggcggaaaatgtattttcactgccggcatgccacggggatcaagtttctgatagatgacaaacagatttcccgcacgtgagaaagaaaacttgttgattccgtttttcaggaatcgttcttcaccgtcgggccccagatccgaacaacaccttagtgaaatggattcaccttgcggtatgccgtctgctaaaacgaccatctcttcacccgcattggttatgataccggtagggttgcaaagaggcgagtagtaattggttctcaatttatctccccaatattcgggcacactgtatgcctgatatgactgtatcctgaatctcttttccgcttcgggataagtattgctctgcaaagactttgccagcacattgaagaatgccggaagccgattgatggtttcgtcggaagcgtccgggcggagttcactgcatgaacgatcggtgaatacagttatcagttgttcgtcaagcggattttccgcagcatggaaaaattccatctcgtcgcaactgacgaaatcatttaatccgcttttaactttgaattgaacagccgcaggtacaaccggatcgttcagcaatatcctatggctgcctcctgctcctttaaaatcataatcttgtatatgaacaaaatccgcacttccttgaggcttgatgtaaagttcgaatgctccgaaattaccgttaccatttcgactgtgatacaggatatagtctagcgtaagctgattctgatcgaattgatattcaagagtaacggggaattttgcagattgactccatgtggaatgataacaggttccgccgaactgaccgtcataagacttcgatatatcctgccccggctgatggtcggtgtcgtatccgccggtaactttcaactttacatccttctccggatttacccccgaaatatcactcgatttcttttgttgtttgatttccgactggtcataaatgtttgtattttctttggatacaaacttgatcgtagcattcctttctgtagtcagaggattggaagcaatggagaatattcgtgtactggatgccagatcggctcttgtatcaggtacttctttctcggtaatccagtctttggcttcctccggaatgactacttcatagtctgtattggaaagcaagttgacttctatatgatcgtttcctgttcccgccacctgaatgacatggctctcttcagccacttcaatgatcaggtcaccgcctgtctgcacaactctgagtttagcagtcagcgcattattggtgatagtaatatttccttctctaactcctttttcgggactggatattgccgaaaccgtcagttctgtatccgatgctttccttgccgtcagccattcttttccctcggttaccgatgcattccactcccggttcgatttgacaggtacggctacttccccaccctctttcttgaatccaatggatttctgaacttgcagcaccggctctccctgcagctccttatcatcactcttgcaagcatagagagtagtgactcccaccagcagaataagagagatacatagtatgtgttttaccttatccaataacatagtatttataatttttgttgtttttccatttcgttgaccagactatccaaatcgaagtcaatgttatattcattctctatctgaatctttttgatttgcttcaccagcgaatgcggcttcagccttcggatcatctctatttccagaagcctgttcgggaaacgtttgcgaatgccatcgatgtctttcatataaatactgtctgctccctgataaagcgcattggcggattcttcaagaataaatgctcccaaactgtcaggatattgttcgagcactgcccgcagaatttccagactttttccgaaactttgatgcgcatcagcattcatatctttagccgcctgaaacaatcctaactgaaacaggtattctcctgttatcgcttttctctccattgccaaagtctggacatgcaatgcggaatccagctcccctatctcagccagtagtttagctttggtaccataataatcggggttgagactgtcaatcgacagtgcccggtccagaaggctgatacacttccgggtggaatcgacatcataagacgattgcaggatggcgaccgcctgttgataaaaactgtcggcactgagatttacgggatggggacgaatgtccggtttctgccgtgaatgacaaccgatggctgtgcaaattagcagcaaaacaagtaatatgatattcagtttctttgttttcatgtacatgattctcaatagtcggataatataaataaaaaaaatgactgacagggagttttataggaaaatgtgtctaatctaatcttatttcctccccgccagtcttttcattagtttatcagatgcctaactgctctttggcccaggcttcatcatgccttactctgtagagatacatctcagccatattccaccatgctttattagcgttagtatagtccaatgtggcttgattacggcgacccgtaggagtaaatcggatatagttgtaagcttgtttaccattcacattgtttttagcggtagcatgaccaccgtttgatgtcggtaaattgaactcttccgtacccatgctttcaaagtattcaccgttggtacttccgtaaatagttgcgatcgttacgtcgcccccattatttatgccagtctgacgcgcatcatattcaaaacgaagcccttgcaacggtttgttcagtttaatctgcacgtaatgggcttctgatacgactggatcttgccatctggaatgataataagttccacctttgccgtcaatcaaagcaggtaagccacctccatcaccgtcctgtgtcgcattagcagaaagcatatcaacagtgagaatgacgcgttccaactcggaagcttcgccggaagtacctgtaatgattacaggactctcagtctccattcccgtaggaccgtaggtcttgaaagtaaaggaatattcaccagcacactgataggtatcatctatgatagccgatgttgtcttgaatccatctatttctatctctttattttcttttgtgaccttatcataatacgtgattttcactttactataatccacatcttccggtgcttcccattgcagagtgatgtgtccggctcccggtgtagcggtagcattcaccacatttacaggaggaacgggaacgaatcctgcttgtttcacagtaactgtaaagctgtttggatcaaccggatctttacttgtgaacgttatcgttccttcacggggttgttctacaactgcggtgttaggctctatgatgaagctttcggaagcatcacgcaatgctcctctggtgagcggtgcagttgcaggcttaatccatgtttgagcattttcgtcaatcacatattcatattccgcacccgcaggaccgttcactttgaaaggaatcgtgatcgtttcgcccattgctttcacttcaaagaccttgtgtgcatcgtcaatgtcaacaatatatcctctcggctgctgcttgataatgaacgtgccgacacagttgtaattctgtgacgactgaagggtgattgtacaatacctcacaatggtatcagtattctgatccaaactgaataccagatttttcttgacgatatcttccgcttttacagctttttgtcctttctttgctttcagttctttcggttcgttaaagcgtacccagttacaggtatccggtacagtgatgacatccagattcagattggtattcacctggatagaaagtgaagtcgctttagcatccaccgccttcattccatcatccgtcaatccgggtatatcgatcaccggttccaagccgaactgtttcacacttatggaataactctggtgaccgtatgctatcgtaacttctgctatacgctgtttatagccttcattctgatcggcagaaaccgtgactttaccttcctgcttttgtagtttgcaccattcggcattcgaacttaccgtccagttatcgagcgccacgttggtctccacttctatctcatgttcgccgccggaaagcggaaaaacaacagccgcctggctctcgctgggaatggtcaatgtcagtacattgaactcagtttcataatcaggaccacaggaagagagagctacgaaagttcccaggattcctgtcagtccgatgattagtatattttttttcatattattagatgcattacaagttttctactcttggattgaattggtatctcagtttggcatttacctccctgtagaggtcggtagacttcaaacggtatttgtaatggaggcggaactccttataataagtggagcgtccgtcgggcgtccggatgacattcaataaatacgtattgtcatattcgccgatgggtgtgagctgcactacgtcgatgctttgatacggcaggatagtgagttccttcgccaacggattctcgggcaactgtgctcccatttccagaatgatgctccccttattgatgatatccagcgcagtggtatagtcagtgaaattttcatcaccggccatcaaacgtacagagttctcagagataggaaatacacggttggaattggtcggacggcgaacttcactatacccatccggattcgggataatgaccgtactactggtgtaattgtagtaagttgccgtctgcgtggacgcatagtaattctccttgtggatacgaagcagcacgtgcctctttttcggattacagtccggtgttctcaatgaatctatcttatattcgagaaaatagatggagtcgggtgaaatcttttccagatttttcagatacaccggaaacatagccttggaagagccggcggaaatgttcatttccatcgtcggaaattcatagcattcttccggcaagtactttgcaaaacgggctttattgatatcaaaattggatttgttgtaagccctcaacagtgtatcggaatgttgcagcaccactgttaccggttcgtcggtagcctgcgatccactcaacgaagctaccacgaaaagggtatctcctccctgctgcaactcagctacctggcgatcatataccaagttggaattactgagtaaatttacttctttgcggaactgttcctgatcgaaatcatacttatcgcaaccacttatcataaccaaagcagagcaaagaattatagttaatatctttttcatattatctttctgttattcttgtttttcctaaaatccgcaactatcatccaatacacgattaagggtagatttatgagtcgttagtagcagctttcagtaaaaagcaacagcacaacatcaatatgtagccaccatccccttaccccacgatgcgacttgaggtaatacgcagattctaaccggaaagaaaggattcttatccgaattctgttttgaaaggtcttgcataagcccggttttcagtatagatattcagcacgtattgccttgctgtcatgatccacttggcaggtacggagatgaagctgaagacaaaagcctttatgcgactcgtttccttgagcccgaaagccttggtgtcaagcttgctaatgatggtcttatagaaattgtgtatcaatgccgtaagcagaaggaatacggtgttctctgacatgaacgacttggggagcctgttccagccgaatccgttgttcatatcatcgaatatacgctctttgcccccacgcttgttgtaaaattcgacgatgtctcttgttgatgagtcataatcgttggtaagaatgcatctgtaggtgtattcaccttcccacaagtcaagctctccatccatgcgcttttgtctctgaatgacaagacgatagcacttgccttcccatttctcaacaagaatggaattgagttcaaactggatgccgttgatttcctccgtcttccatcccctcagtgaaaacaagtcatcgtagagcgaactgcatctgttggcgcggatgtagaagtgcgtgcaatgcttctctatctcactgacaatttccttcgagcacgaaccacagtcggctctgaagcgattcacacggatgctgttggcttccagtagggcaaagaatctcttgtgggtctcagcctgataaaagcgcacatttgtgttgccatcgctgttctcgacatagacaatcatgtcaccgatgacatatacgccaggtctgtagccgaggaacttcttgtatgtcggttttgcatcatacttctctgtttcaaggaactgatggtcgaaatcaacatcgtaggtttccacctcattcagttcaccagtggaaaccaaggcttttataagcaaggcgttgagcttgtctgccgtattgaaatcataggtcttgcccttatcggaagtatatgagatgttttcctgtgtcagttccttgatggctctgaggatggtatcagagctgcatgtgcgcaaggtcggatgatacgagagatgacgcatcagatgcgatgttacatcctccacgcatgaaccgccacagaagtatacgctcatcagagaacgaataatttcgctgtactggtatccgatgatactgcggcatctctgaccaagtgtctggtcgataataggtgaaagcatggagtcaaattgctccatgattgaaaaaattcctccaaaaggtgtgagtttttcagattttatttgtacctttgccatgtcttgttacgatttacgcttgttttgatttgcaacactaagataagtgaaaaatctgacatggcaaaatcctgagcaactttttgttgctcaggaacttataaataaagttaaatcaaagtgttgcggaattaaggtttttcattatctgtcccatcccggattctggtccatggaaggtactttcagtaattcagagtgactgatcggcataaataccattttgggcagtgcgacgcgatcgcggatattctgttggtcaatggtcacgatgttccagaatcccggattgccggcgacgtccgtacggtctttttgtacatccaatccctgccagttagacgtattggcatcctcggtaaggtaagtaccccatctacgggtatcgaaatagcggtagccttcgttgaaaagttccacttgtcgttcattacggatgatctgctcaaatctctccacctcgttgaagtcacccaaagccggaccgggtaatccgacacgatagcggatcatattgaagtatttagccatttcctgaatatcacggctgacagtcacttcgacatccgtacctgtcatatcaggagtagtaacggtgaccgtacccgtcacccggttcaacgcttctacatattcaaggagtacttcggcataacggatgatggcaaacggtttaggctgagtaacaaatgcgcctttcacacttccttttccgctcgaccatgaatcgtcaggatggacaaacttgacgggagtgtagccgctgatattgtaatcattgacgttatttcccgcaccggccaacccggcttgcgtatcatcatgagaataccagaactgctggttgacataggttgcgtcggaagaagcggaactcatagtccacaagcgtccgggaaatccgatggaagcatagaaacgtgccgaacggttgtcatacatcttcggaacatcacctctcaactgatagtttcccagcactttattcgtacctattgtctggctgagatccgctacatacggatagtctgccgatgcattgtggatgtctctgccatccatcatcaggaagcaatcgaccactctctgaggtacggacatgccgccccagcctccgaatttaacagggaacgagtggtgcgtgtaattagtcacattttgggatgccattgcccagataaactctttattggtttgaataataccttcaccgttgaacatatcggcaaaagaatggtaagggtcgataccacccgcaccatcggggaaaggagccgtaggaacattatctgccaacggataagggtattgattgtccggtgccactgtgaacagtgaatagtattccatattgatcacttgctttgcggcagcggctgctaccgcccaacggtcgggatcataagtctggtttacgtaatcggcaccgtcgcttttgcgcttccaattgctaaagcacaggcgggcggcatcaccgccattgaacaacggagaagcttggaacaggcgcagacgggcaatcaacgctaaagctgcccccttggtaggacggtcggaatagctgatactctgctcggtcggtccataaataccttgtgtggcaagcttgaattcattgcaaatataatccaccgattcatcgtatgtagaccgttccctgtcatagtattccgcagattcggaagtacctagtacttcgtctccgacaatgagcaacggaccgtagttcatcagtaaatggtagtaggcataaccgcgcataaagtgtacgtatccgatgtaacgtcttctgtcggcttctgtcatatcagacactttatcgatattttccagcatccggttacatcttgccactactacatacatgctataccatatatcctgccgcaggtttcttccgttgacagtaccaacactgaattgcgctccccaaaactcgttggtctgccatctgacggcaatctcgtccgaggcagtttctcccggattccatgagtttccccaaatggcacccgcatcgggaaaacgggtcggggtgttccaaaggtatccttcggcatttttcatgctgtggaaaatggaatcttccttgaatgtagcctgaaaataattgtctacatccagaaaattgcaggaactgagcagcaaagaactgccgatcacggctcccaaaagtattttaattcgatttttcataaatttttcaatgttatgtgattagaatcttaagtatacctggaatgaataggtagcaggtatcggatagacagcaccatttgccgatgcttgttcgggatcgaaatatttcacattgtcgaaagtgcacaggttattcgccacaaattccagatcgacggaagacaatcctaccgctttaatccatggcagatgtttcaggctgtatcgcaagctaacttcctgaaggcgcaggaaagaaccgttccgcctccagaaggaggacaattgagaattgttcttattacctccgtaagagagacgtggaaattcagcattcggattttccgtttcagtagttcccgaataccatgcgggcgtccatctgttcttgggattgttggctagtttgatcacatttcccaagtctccattatagaacggaatccatccgttgtcgtttccaagccctgcacgatagtagtctaccttggcggaacctttgaacaagacactaacagtcagatctttccactggaagtcaccaccgaatccatacatcactcttggtaactggttggaataagacaatggcaccttatcgtcttcattgataataccatcgccgttgacatcgcgatatttgatgtcgcccgggcgtatctttccgaatccgctttgatcggggctggtattgatctcatctttgctggcgaatagtccctcggagatatatccgcgtaagatgttaaagggtctgccggtcacactgagatagtcgtaaggtaatttattctcttcaaaatagtcgatgatattttgtgagaatgtataattggcacgaaccgtaaaactcatatccttattaatagtatggaaaaactcaatatttccgtccgatcctacactgtgcatacgtccgacattcgacttcggataagtcaccatacctacgtaagaaggtaacgtcacacggtcctggaagatgtggtcacgagtatcccggaatatgtcgactgtcagggacaacttgtcgtgaaagaacttggcatcgataccaagattcgccttctttgctacttcccatttcaaattgtcggctccggtatgggtttctgtgatacccgcataacgatatccccaagcagatccggcatgattgtctatcagggtcaggtaagggaagcgtccctggccggtataatcgttggtagaaacaatctggtcgttacctacgataccgtaagagccgcgaattttgaggaacgtaaaccaaggtagtttctctgtccaccatgcataagaggaaggaacccatcctgcggcaatggaaggaaagaaaccgaactgttctccttttttgaactgtgcagaacctgtataaccgaaattcgcatcgatgaaataacggtttttatagtcataggagatacgtccggaaaggttctgatggcgtttggggatgctggcgatacctaaatcatcatatttgccccatagagagtttttctcatctttcatatagtattcgagcaacgcgccaaaggtatggtctccgaacgaccggttccagttggctttcgcctccatatagtattgcctgtaagagttttcgccacttccgtatgccatacttgattgtgctgagcgcagcgctttaatcaagactccctgtgcggttcgtccggtagcacggtagaggtcgggccaaatcctgcggtattcgctgaagtagccgatatgttccgtcatcgcttgtaccgacatcgtcagtcctttcagaaatcctccgaattcttgcgtcagcttcagcgtcagcatgtttcggttgtcctcgctttgcatgtatccggtattattcagcataacatatggagaagccaattcacgtgatccgccatatacgggcagcgtgccgtcagagtaagtgaccggaaacagaaggggggtcaactgctggacggctgaccataccagatctgtgttccctccgcccggactgacataagaattgacatatccatctacaccgaagtatagctgggtcgtcttggtcaaattcatatcgatattggcacgataattcagcttgtttacgctcaatggctttttaaacagattttcctcttggcgataggcggctccttcatcctgataccccagcgacaagaagtatctggcaacgtcacctcctcctttagcactgacatagtagttctgctgaatagaattccttttcatgatttcatctatccagtttacatccggataaagatccgggtccagcctgtttttgatcagatccagttcaagacgggtgtacagatcgtcttccccagacatcgctctggcttcattggcaaggagtgcgtaatcatatgctcccaggtattcgggcagacgtttgatatgtgatattttcatcgtagcacgtccggtcacctctaattttccactggtaccacgtttggtagtcaccaataccacgccatttgctccgcgtgttccgtagacagccgttgctgcggcatctttcaggatactgaacgattcaacgtcgtcggtatcaatatcttccaatcttccttcgagaccatcgatcagtactaaggctccactgctggctccgaaagtactgataccgcgaatccagaagttggagatatttttgcccggttcacccgaactctgcatagtgataacacctgccattcgacctccgatcatattattgagggaagtggcgggagtttttagctgcgcaacgtcaatggtggtgatggcacctaccacagatacttttttctgggaactcatacccgttaccactacttcgtcaatcttagtctcgtcttctttcatgacgatcttaagcttttcttcgtttttggtaatcagcatctcgacattcttcatacccactgactggaatatcagtgtagcgtttttcgttacttttatcttgaactttccgtccagatccgctactacgccgactcccggttcgttctttacataaacagccgtacctaccaatggctcgccggttgcatccacaatcacgcctgccactgtaaactgtgtactcgtttcgttctgactgtagcctgccaatggaatcaatgtcataagcagtacaatcaataaaagattttttttcatatatgtattatcaaaggttattgtatagacaatttacgaatcactttatttccggtatctgcgacatatacaatttgtccgtcggcactaacagctacaccgaacggatgattgaacaacgcgatatccggaccgccgtctttatagcccttcatgcccggaagtccgataggagtagttaccatagctctatccaagggcaatttggtatcgattactcgtatacaattgttaccacaatcagcgatatacaatttaccgtcttcggtaaagcagatttgatggggattatcaaacttggcattcctcagcaaaccgtcttcccatcctgctcctgctacctgtccttccaatatggcctttccggcataaccttcaccgggataggtgtttttgtctttaccttccagatttcccacatccactcgccatatctgatttccttctgccatcgcgacataaagcatattttcctgtcctttgacagggctgaaagcaaggtatgagtcacatgcatcaggtctggtagaagttccgactttcttgagtaggagttcacaagtacgggtgttcggttttatccgcaccagttgtcccttaaccatcactgtataaatgtaatgatccagcttattcactacaaagcagtgcttatagttaccatcggcaacgtctttagtttcatcattcagcagcaccgtcaggcggcgcggcgcatagctcacgcttttggccaaagaataatatcccataccgccatcttcaggagcgtacatcgtaccatccaggtccgaaaaagcaggagcattcaggatggctgacgtaccatactgaagtaccagcacagaattactcttaatggaagccatgacaatatttccgttagactgcgctcctttatcattttgacaggttacagatggataattgtttcctccgtgccatacgtggcgttcggtgataaagatattatcctcgtcatccagactaatgtagttgggcgccgacaatgtagaagtagcgatgtctcctcctaccgtaggctggttagcgtccggcgaagcttgtcctacaacggtagtcacgctcgtctgcgtcttgtagataaattgccttccggcttgtccttcatattctgttccgtcgggcattgttcgggcaacaagaagattcatttctttcttgtacgtcagtcccgaaggaacatacaagtagattttgttaccatttgaactcaccaagcccgcctggtgctttatcccatccgcatcttcgaaataaactttcagattggtagtgtctgatccgaagttgctgccttcgacgatcataggggtagcgatcccaccggaatccggataaaatccggtcacctcaataggttgatccggattgaatactgcacttcctatattcttactatccgaacatgaagtcagatagacaaatacggcggcaaaaaatgtcaaaaaaatagttcttttttgcattgtttttctgtgattaaaggttaataattagttgggttaatatggataagtagaaaacttactattctatatctaggcattatgataatgtggtagaaataagatgtgcatttttactctaatacgtttgtttttgggtgtgtatgctttatcttaatatttagtaagtttaggaatatatatagttgtgtttgactgttatcattcatttgtttttcttgggggtattgaaatttttaatgaattcaatctctcttcagcactgttctgatctatgctgaagaaacgataataaaaatttaatcactgcccggaggcggcctacaatttcgcattatcataaataattattaagaaatatagtcgtaattgaccgattagaataagtcgctctagaacttggtaatcaaaacaataaaatcatgataatcaataatatacatcaataaaaagattatatctatcttattacgatctgagtagtagaatgaaaaatcaaaaaaaataccgtttgccgataattaaaataaaaaaaacattgcgtttaccaattttattaataactttacaccgtcttaagtggcacacaaacttaataacctttgaaaagcctatgaaaacaggaaaaaatacacttattggtataaaattaccaagttctagagcaacttatcccaatctgttaaatataaaaatgaatcataacagccaagcacaactatatatattcctaaacttactaaataaaaaaggtagtagatccccaaaagaataaatgcataagaaataaaatgcacaccttaatttctaccatatataataatattttctccttcaccaacaatctctggcgaataggccgtaataagaagtaaaggctatattacataaaaaaaattccagtaacttgcgatactggaattttatataaatcaagaaaatctcttattcccactcaatagttgcaggtggcttagaactgatatcataggttacgcggtttacacctttcaccttattaataatatcattcgaaatcttacccaggaattcatatggcaaatgcgcccagtcggcagtcatggcatcagtagaagtcacggcacgcaatgctaccgctctttcataagtacgttcatctcccatgacacctacagactgtaccggcagtaagataacgcctgcctgccatacttgatcatacaatccccagtcgcgcaatccctgaatgtaaatatcatcagcatcttgcaggatacgcactttctcacgggtgatgtctccaagaatacgtacagccaaacccgggccagggaatggatgacgagtaatcagatgttccggcatacccaactcgcgacctacacgacgaacttcatccttaaacaacagacgaagcggctcgcacaacttcaagtgcattttttcgggcagaccacctacgttatgatgactcttgatcactgtacctgttatagacaatgattcgatgcagtctggataaatagtgccctgagccagccatttcacatcttttattttgtgagcttccacatcgaatacatcgataaagcccttaccgataatcttacgtttacgctccggttccgtcacacctgcaagctctgcaaagaacttttcgctggcatccacgccaattacattcagcccgaggcattcgtaatcgttcatcacattcttgaactcattcttacggagcataccgtggtctacgaagatacaagtcagattcttaccgatagctctattcagcaaaacagcagcaaccgatgaatcgacaccaccgctcaatcccagcaccactttatcatcacctaactgagctttcaactcagcaaccgtactctcgatgaaagaagccggcgaccagtcttgcttgcatccgcaaacatcaactacgaagttcctcaatatctgcgtcccgtcttcgctatggaatacttccggatggaactgaacgccccataccttctccccctcaacctgataagcagcgatatccactttatccgttgaagcaatcttcttaaaattatcagggatagcagtgattgtatcaccatgactcatccatacctgcgtattctcacgaactcctttaaacagcacattatccttgcagaaagaagtcagatgtgcacggccatattcacgtgtaccggccggttctacttttccattgttagtatacgccataaactgtgcaccatagcagatacccaaaataggatatttaccacgaatctcactcaagtctactttgaaggcatctttatcataaaccgaaaaaggacttccggaaaggatgactcctttaattgtcggatcttctttaggaaacttgttataaggaacaatttcgcaatacgtgtccagttcgcgtacgcgacgaccaatcagctgtgttgtctgcgaaccgaaatcaagaattattattttctcctgcatatcaatggttggattttgaataaatgatttgcaaaagtagaaaaaagtaggcaaaaagatagaagaataaacagaaaaatcgaaatttacgagagaaatatatcatcggacaacataaaatccgaaaagggaaacgatgtcagagagacttatatataataaataggagactcaaaacagaatctcctattcattatacaagtacttatttcttctctttcagcaagtcacgaatctcagtcagcaacacctcttctttagtaggagcaggtggtgcaggaggagcagccggggcttcctctgccgccttcttcgtggtcagtttagtgatcagacgtataaataggaatatagcaaaagctataatcagaaagtcaaaagttgcttgcagaaattgtccgtaatccagagatacggcaggagcaatctccttaccgtctgctccaacttcagccgctttcattacccatttcagatctgtaaagttcacaccaccaaccaataagcctattgggggcataataacattcgccaccagtgacgatacgatcttcccaaacgcgccgccgataactacaccgacagccatgtcaatgacgttccctttcatggcaaacgccttaaagtcttgtaaaaatgtgctctttcccatcttttttcaatatttaatgtgaatttaatatgcgaatataaaaacatttttgtaattttgcaccgcatttgaaaataaaacaaatgcgcgagctgagagatatttgaacaaatattataaaacccttaaaagtttaaacaaaatgattaaagtaggtattaatggattcggacgtatcggacgtttcgttttccgcgctgcaatgaaaagaaacgatattcaaatcgtaggtatcaacgacctttgcccggtagactacttggcttacatgctgaagtatgacacaatgcacggtcaattcgacggtactatcgaagcagatgttgaaaacagcaaattgatcgttaacggtcaggctatccgcatcactgcagaaagaaacccggctgacttgaaatgggatgctgtaggtgctgaatacgttgttgaatctacaggtttgttcttgagcaaagacaaagctcaggctcatatcgaagctggtgcaaaatatgttgtaatgtcagctccttctaaagatgacactccgatgttcgtttgcggtgtaaacgaaaaaacatacgtgaaaggtactcagttcgtttctaacgcttcttgtactactaactgtctggctcctatcgctaaagtattgaacgacaagttcggtatccttgacggtttgatgactacagttcactctacaactgctactcagaaaacagttgacggtccttctatgaaagactggagaggtggtcgtgctgcttctggcaacatcatcccttcttctactggtgctgctaaagctgtaggtaaagtaatcccggctttgaacggtaaattgactggtatgtctatgcgcgttcctactttggacgtttctgtagttgacttgactgttaacttggctaaaccggctacttacgctgaaatctgcgctgctatgaaagaagcttctgaaggcgaattgaagggtatcctgggttacactgaagatgcagtagtttcttctgacttcttgggtgacgctcgtacttctatcttcgatgctaaagctggtatcgctttgactgacactttcgtaaaagttgtatcttggtatgacaacgaaatcggttactctaacaaagttcttgacttgatcgctcacatggcatcagttaacgcttaattagaagtctaaacatataggaaaccgctgcgggaaaccgtagcggtttttttgtcttcattttatatattgttaaaaagcaaggtattatccgtggtataacctacaattttagtagttttgtacttctatgaagagaattatgaagagaatattaataacattgatactagtttacaccatgaacaatatactgaacgctcagaatcctttcttcggtcagtatcagacaccgcatggtactgtaccctttgaccgaattaaaacagagcattatgagcctgccatcctcgaaggaatcaaacaacagaatgcggaacttgatgcgatcatacaaaacccggagaaggcgacatttacaaatacaatagaagcctacgaacaatccggaaggctgctggacaaagtaactgccgtattcggcaatatgcttagtgctgaaaccaatgacgacttacaggcattggctcagaaaatcatgccgctactcagcgaacacagcaacaacatcacactgaatgagaagttgtttgcccgtgtgaaagaagtgtacggacaaaaacaatctctgcaactgactcaggaacagaatcgcctgctagacgatatatacgacagttttgtacgccacggtgccaacctcgaaggggaggcccgcgaacaataccgacaactgaccaacgaactgagcaaactgacactcgacttcagcgaaaacaacttgaaggagacaaacaggtatcaaatgcttctgacagacaaagccagcattgccggactgccggaaatcatcgtagaagctgctgccgaaacagccagaagtgaggataaagaaggatgggctttcaccctgcacgctccaagttatgtgcctttcatgacttatgccgacaaccgcgagttgcgccataagctctacatcgcatataatacaaagtgtacgcacgataacgaattcaacaatatcgaaatcgtaaagaagctggttaatacacgcatgaaaatagcccagctactaggatataaagattatgcggaatataccctcaaaaaacgaatggctgaaaacagcgatgccgtatataagctgctcaaccagttattggaagcctacactcccaccgcacagaaagaatatctcgaagtacaggaactggcacgtgaggaacaaggtgatgacttcattgtcatgccctgggactggagctactattccaataaactgaaaaacaagaaattcaatattaatgaagaaatgctccgtccttacttcgaactggaacaagtaaaaaaaggagtattcggactggcagaaagactctacggaatcactttccggaaaaatacggaaatcccggtttatcacaaagatgttgaagcctacgaggtattcgacaaagacggcaagttcctgtctgtactgtacactgacttccatccccgtcccggaaaacgcgccggagcctggatgaccagttacaaggaacaatggatagatcccgtaaccggtgaagacagccgaccgcatatatctgtagtgatgaacttcaccaagccgaccgaaagcaaacctgctttgctaactttcaacgaagtggagacattcctgcatgagttcgggcacagcctgcatggtatgtttgccaactcaacctatcagagcctaagcggaacaaacgtatattgggactttgtggaacttccttcacagatcatggaaaactttgccatcgagaaagaatttctcaatacctttgcccgtcattatgaaaccggagaagtgcttccggacgaactgatacagagactcgtggatgcttcgaacttcaatgcagcctatgcctgcctgagacaagtgagcttcggtctgctcgatatggcatggtacacccgcagcactcctttcgagggcgatgtaaaagcctatgaacaggaagcttggaaagacgcacaagtattgccgatagtcaaagaagcctgcatgagtacacaattctcccatatctttgccggaggatattccgcaggatattacagttataaatgggcagaagtgctggatgcggatgcgttctcactgttcaaacagcaaggaatcttcaaccgtgaagtagcagattcgttccgcaacaatatcctgtcgaaaggaggtacagaacacccgatggtgctttacaagcgcttccgcgggcaggaacccaccattgacgcattgctgatccgaaacggcataaagaaacaataaaattaaaaaaggagagaattggacatgaagaagagattgatacttaaagtattaggattgctgttattgcttccgatgttttccggatgtaatgatacggatgatgtagccggcatcttcaccggcaagacatggaaactgacttatatcaccaaagccaacggccatggatggtataaatttgcggatgtggatgatagcaacatcatggaatatgcagatggaaagaaaactttcatgctggttttttccggtactgtagaggatgatataatacaaggtacatttacgggcagcggcgcaatcaacgccaacggaacctggagtgcgaacggcaaaaaccaggaattcgggatgaaagtggaaaagggaactcccatcgacagcaaagaccgcatcgccgaaaagatactggaaggtatgaaaaaagcaaattcttacaaaggatcggacagccggaacctatatctttattaccagactgataaagaaagcctctgtctcgtattcgctccaaactaagactagaattgaaacaagatggacacggaaaagaaacaattggaactggacaaacgttacatacgtatggcaagcatctgggcggaaaactcttattgccagcgtcgtaaggtaggagcgttgatcgtcaaagacaaaatgattatctccgacggatacaatggtactccttcgggcttcgaaaacgtatgcgaggacgagaataacctgacaaaaccttatgttctccatgcggaagcaaacgctatcaccaagatagcacgctcgaacaacagcagcaacggtgccacgatgtacgtcaccgcctcaccttgtatcgaatgtgcaaagttaatcatacaggcaggaatcaaacgggtagtctactccgaacattaccgcctcgaagatggaatagaactattaaaacgggcaggaatcgaagttatctatacagaaatgaacgaagattcttctccaaacaaataataaaacgaacgttttaaaaaaaaggaatagacatgagtacaagaaactcttcacgttttacgcctatcatcatagctatcagcgtggtggccggtattcttatcggtacattttatgccaagcacttcgccggcaaccgtctgggtatcatcaacggttcttccaacaagctgaatgcgctgttgagaatcgtagatgatcaatatgtagacaccgtaaacatgaccgaccttgtggagaaggctatgccacagatcttggcagaactggacccgcactccacttacatccctgcacagaatctcgaagaagtcaattcggaactggaaggcagtttcagcggaatcggtatccagtttacgatacagaatgatacgattcatgtgaatgccgttatccagggaggcccatctgaaaaagtgggactcatggcgggcgaccgcatcgttaatgtagacgacagtttatttgtaggcaaaaagctgaacaacgaactagccatgcgcacactgaaaggtcctaagggatcgcaggtgaaactgggtgtcaaacgcgtaggagaaccgaaattgctggacttcaccatcacccgcggagacattcctcaaaatacagtagacgctgcctatatgctgaacgatgatatcggttatgtaaaagtcagcaaattcggacggacaagccacgtagaattgcttaacgccttggctcagctcaatcataagaaatgtaaaggactgattattgaccttcgcggcaatacaggaggatacatggaagctgccatccgcatggtgaatgaattcctgcccgaaggtaaactgattgtatatacacaaggacgtaaatatccccgtgcggaagaatttgccaacggtacgggcagttgccagaaaatgccactcgttgtattgattgacgagggttctgcttctgccagcgaaatctttaccggagcaattcaggataatgaccgcggtacagtggtaggacgccgttccttcggaaaaggactggtacaacaaccgattgacttcagcgacggctctgctatccgcctgactatcgcccgctattatactccttcagggcgttgcatccaacgtccttacgaaagtggtaaagacaagaattatgaactagacatatacaaccgctacgaacacggtgagttcttctcacgcgacagcatcaagctgaacgaaaacgaacgctatctcaccagcctgggacgcactgtttatggtggtggcggtatcatgccggacgtatttgtaccacaagatactaccggagtcacttcttatctctcatcagtaatcaaccgcggactaactcttcagtttactttccaatacacggacaataatcggaagaagctgagccagtatgaaacggaagaagacctgctgaattatctccgtcaccaaggtctggtagagcagttcatccgctttgccgactcgaaaggtgtaaagagaaggaatattctgatccagaaatcgtataaacgactggaagcgaatatatacggcaacattatctataatatgctgggactggaagcttatctgaaatacttcaataaatcggatgctacagtacaacaaggtatagaactgctcgaaaagggagaagctttccccaaagcacccgccgagacagaagaggaagtgacgaaagataataaagatggaaagaaaaaaagaactgcgcaagcttatggcatcactgaagatccgacacgcatcttcgactttgcagaagctacaatcagctaaaatacttgccgccctcgaagcccacccggctttcagggcggcaactactgtattgctctaccattcgctcaaagatgaagtagacacgcatgcgtttatccggaaatggagcaatgagaaacggatattgcttccggtagttgtcggtgatgaattggaattacgcctctataccggtcccgaggatatggcaaccggcacttacggtattgaagagcctgttggagaaacatttacggactatgcagacatagactttattgccgttcccggtgtagctttcgaccggaaaggaaaccggctgggaaggggaaaaggctattatgaccgtttgctgccacgtatccccgcagcttataaagcaggcatctgcttcccatttcaaatagtagaagaagttccggcagaagcattcgacatctgcatggacataattataacaagtaatgaggacgaattatcacacccacaccacccgctgcctccatgcgacagggagtgacgaagaatttgttttaagcgccatcaaaggcggctatcaggaacttggtttctctgaccacacaccatggaaataccataccgattatgtatccgacatccggatgactcccgaagaactgccggagtatgtagaaagcctccgctcgctacaaaagaaatataaagatcaaatcagcattaaaatcggcttggaatgtgaatattttccggagtatattccctggctgaaaggagttatcaaggagtatcagctggattacatcatcttcggcaaccaccatttccatacagatgagaagtttccttatttcgggcgaaatacccatacggtagatatgcttgaactttatgaagagagtgcgattgaagggatggaaagcggcttgtttgcctatctggcacatcccgacctgttcatgcgttcatatcctgaattcgaccgtcattgtaaacttgtcagcagacacatctgccggacagcagcccgcttgaacctgcccctggaatataatataggttacgaagactacaacgatgaacatggaataacaaccattccccaccctgctttttgggaaatagcagcacacgaaggctgcaccgccattatcggagtggatgcccacaacaaccaatatcttgaaactccgttctactatgaccgggcaaatgagacactccaaaagctggggatgaaagtgacagacagaattcctttcctcaacgaaaaataatgtttgtgataaccgtagcccctactctctgattcagagtacgcaccagaagttcccgtcccatcatcagttcctgacgaagggcggcggaagtgagatgtacatacagcgtctggttacggatatagagattactggtatagcttgccgccggtcccaacacctgcggccaggcatccagcaaccgctgctcattgagaggagactccagactctcctgacgcaggtattgctgaatcagttttcctatctgctcggcatcgttacgtttcattgttctgctcccatttcattaattacaccctgatctacgcggaatactttataatcgctgcctaccttctgcagaatacgatccagatgttcacggttggtatccgttataaatatctgtccgaagttgtcaccagccaccagcttgacaatctgctctacccgcgaagcatccagtttatcaaagatatcatccaacagcaataaagggacggtctgccccgtacgtttcaagaagtcgaactgcgccagcttcaacgctaccaaatacgttttattctgtccctgcgaaccttccttcttgatcggaaagtcacccaacagcatattcagttcatctttatgaatcccccgcaaagagaatcccataattttatcccgttcccggctttgcttcagtacttccagcaaagaagcatcccgtgcatgcgaatcataagacagccccacctgctctttatcctgggaaataaaagaatagaacgactggaaaataggaataaactcttcgataaacgcctcccgcttgcgaaaaacaatttcacccgcttgcgccatcatctcctcccaaaccaggaacaattcctcttctaccggaaattcactttttaataaggtattacgctgtgccaatgccttattatagcgtatcaatgcttccagatattccttatcatactgagagatcacgacgtccataaagcggcgccgttcgtcacttcctccggctatcaactccgaatcggcaggcgaaaccatcactaacggcagaaagccgatatgatcggaaaagcggctatactcctttttattccgtttgaattgctttttcgaacgacgcttcattccgcagtaaatctcctccggtgtgccatcttccgcctcataaaagccctgaataacaaagaaatcctgatcatgccgaatgttctgcgaatcaatcggattacccgaactcttgcagaaagataaaaagtacactgcatcgagcagattcgtcttgcccatcccgttctgtccgaagaaacaattcagtttggcggagaatccgatctctacctgttccagattcttatagtttaatatggatatccgtttcagtatcattgtatacgcgttaatttgttcacaaaagtagcaagtttttcgaggttttcgagcgtaaaacaaaaaaagatgcctctaaatttcgtttgtagatataaaaaaactacttttgcgagtcgaattatcaaacgatgaataataacaaaaagaatcatataaaaatggcagaacaaaagaatcagaacgaacatctgaacgtagaagatgcactgacacaatcggaagcatttcttgttaagtacaaaaacgcaatcatcggcggtgttgtagccgtgattatcatcgtagcaggttttatcatgtacaagaacctctatgctgagccacgtgaagaaaaggcacaggctgctcttttcaaaggacaggaatactttgaacaagatgcttatgaacaagcactgaacggtgatagtattggttatgtaggtttcctcaaagttgccgacgaatatagcggaactaaagccgctaatctggcaaaagcatatgcaggaatctgctacgcacaactgggtaaatatgacgaagcagtgaagatgctcgacagcttcaacggaggcgaccagatggtagctcccgctatcctcggcgcaacaggaaactgctacgcacaactgggtcagctggacaaagccgcttctaccctgctgtctgcagcagacaaagctgacaataactcattaagccctatcttcttgatgcaagccggtgaaatcctggtgaaacaaggaaagtatgatgatgccgttaatgcgtatactaagatcaaggacaaatacttccagtcttatcaggctatggatatcgacaagtacatcgaacaggctaaattgatgaagaaataatataccttattatatataatagaaggttaggcacggattacacggatttcacggtttttagtacgcacaatatgtactaatgcaattatgcgaagctaccgtgaaatccgtgtaatccgtgcctttttaaaatcatgtatttataacccactttaattactacaattatggcaacagcataccataacttatccgaatacgatttcaactctgtcccgaacgctgaaaacatgaaattcggcatcgtcgtatccgaatggaatttcaatattaccggagccttattgaacggcgcagtcaatacattaaaaaaacatggagtaaaagacgaaaatattctggtgaaaactgtaccgggaagtttcgaactaactttcggcgccaatcaaatgatggaaaattgcgatgtggatgcaattattgcaatcggttgcgtaattaaaggagatactccacattttgattatgtttgtatgggagcgactcaaggaattaccgaattaaacgcaactggcgacataccagtcatttacggattaattactaccaatacaatggagcaagcagaggatcgcgccggtggcaaactgggtaacaaaggagatgaatgtgcaatttctgcaataaaaatgatcgattttgtttggagtttaaataaatagttgtatctttgcaccgcaattgagaaacaaacctcctcaaaagcaaaaaagggcaaataccagagtggccaaatggggcagactgtaaatctgctgtctttcgacttcggtggttcgaatccatctttgcccacaaaaattgcggaagtagctcagttgatagagcattagccttccaagctgagggtcgcgggtttgagccccgtcttccgctcttcaaagagaatctgagaaattagattctctttttttgtattactttaaacctctaagaacatgaaagattctccaacgcaatcaagcgtactgcaattggcacacccccctatcccaattgtccgcatcggaattataggattggggaatcgagggctacttaccctgcaacgttatctgcaaatagaaggaactgaaatcaaagctctctgcgaaatcagagaaggcaacttgaacaaagcccaactcatactaaaagaagcaaagcatccagaagccatgggatataccggaccggacggatggcgaaggatgtgtgaatgcaacgatctggatttagtctttgtctgtaccgactggctcactcacacccaaatggcaacctatgcaatggaatgcggcaaacatgtagctatcgaagttcctgccgccatgaatgtagccgaatgctggcaactggtcgatacagcagaaaagacaagacgccactgtatcatgctggaaaattgctgttatgacccttttgccctgactactctcgaaatggcacgtcaaggtgtactcggagaaatcatgcatgtagaaggagcatatattcacgatctccgttccatgtattttgccgaagagagcgaaggcggttaccacaatcactggggaaaaagatacagtatcgaacatacaggcaatccctaccccacccacggactagggcctgcctgtcaaatcctcgacatccaccgcaatgacaggatggaatatctcgtatccatgtccacccatcaggccggcatgagcgagtatgcgcggaaaagattcggagagaactcaccggaagcccgtcagaagtataagctgggagatgtcaacaccacgcttatccataccgccaaaggaaaaacgatcatgcttcagtataatgtttcgactccccgcccttatagtcgcctgcaaacagtatgcggcacactcggctttgcacaaaaatatccggtaccatgcattgccctggattctcatggagatactccgcttgaaggcgaagcacttgaacaagtattaactctctataaacacccttttagcgccaccatcggcgaggaagcacatcgtaaaggattaccgaacgaaatgaactatgtaatggattatcggttaatatattgcctgcgcaacggacttccccttgacatggacgtttatgatgcagccgaatggtcgtgtatcaccgaattaagcgagaagtcggtattgaacggaagtattcctgtagaaataccggatttcaccagaggtgtctgggaaaaacacaaacattagattttacctatttaccccaattaaactataaaaacacatgagaacattcctatcattaaagacatgcttactatctgcacttttactttgtgtaaacagcatttcggcaagcaaagttatttccgtatccgatttcggtttgaaacccgacagccgtatcaacgcagtgccatttatacaaaaggcaatcgatgcttgcaagcaacatccaggttccacacttgtctttccaaaaggaagatatgatttctgggcacaacatgctatcgaaaaagattatcacgaaacgaacacctacgatgttaatcccaaaattctcgccgtgctattggagcagatcaatgatctgacgattgacggtaatggttctgagtttattatgcatggacggatgcagccattcactctggatcattgccggaacattaccttaaagaacttctccgtcgattgggaaatcccattaactgcgcaaggtattgtcactcaatctacctccggataccttgagatcgaaatcgactcccaccaatatccttatatcatagaaaacaaacgactgacttttgtcggtgaaggatggaaaagcagtctttgggcgatcatgcagtttgatcccgacacccatctcgtcctgccaaatacaggtgacaacttaggctggcgctcatacgatgcaacagaagtaaaacctggattaatacgcttatccgatcctaaaaaggaggctgataaattcttccctgcgccgggtacggtccttgtgttacgacacagcaccagagaccacgccggtatcttcatttaccacagcatggacacaaaactagaaaacgtaaaactattccatacctgcggactgggaattctgtcacagtatagcaagaatatatctttcaatgatgtacatatcatccctaacacttccaagaaacgtgtgctgagcggacatgacgacggtttccacttcatgggatgcagcggattactcaagattgagaactgcagttgggcaggattgatggacgaccctattaacatccatggaacatgttcccgtattatggaagttctttctcctacccgcatcaaatgcaaattcatgcaggacatgagtgaagggatggaatggggacgtccggacgaaacaatcggatttatagagcataaaaccatgcataccgtagctactggtaaaatgaataaatttgaagcactaaataaagctgaatttatcatcgaattatcagtaccacttccagccggagtggaagccggatatgtaatagagaatctgacctgcacacctgatgcagaaatacgcaactgccatttcggaagttgccgggcacgtggtctgcttgtatctactcccggcaaggttattattgagaacaatgtattcgaatccagcggctctgccattctgattgccggagacgcaaatgcatggtacgagtcaggagctgtcagagacgtgctgatacgtaacaatgatttccgttatccttgcaattcttcgatttatcagttctgtgaagccgtgatcagcattgatccggaaattccgacaccggaacagaagtacccctatcatcgcaatatccgcattatggataataccttccacctatttgattatccgattctcttcgcacggtcggtagacggactcaccttctcctccaatacactcatacgtgatacgacttaccagccttatcactatcgtaaagaaggtattacgctggaagcatgtaaatctgtggttatttcaaacaataagattgaaggggatgtattaggacgtactgttaaaattgaaaatatgaaaccttcggatgtcaagattagcaagaaccctttctttaaaccgaaaaaataaaaaacaccatataggcaattaaacgtattcaggctcaagcatgagcatgaatacgtttgagtctttatcccataaatacaacaaataaaggaaggttctctttgatgaacttcaatgctaaggtaatctgccgttctattgctttttcactgactgcacaacgttccgcgatttcccgattagatagatgctcttcgcggctcattctaaagatctgctgccgtctggccggaagttgcgaaatcaatttatcaatatagttcttcaaatcagcagcatccaattcctcttctatatcataagaattttcaagtcctttcagaactgtcattttaaaattcagctcgttaaaatgtctacgcgaataattgaatataatattacgggtaatcataaaaagcaacccatcaaaattcttggtaatatcaagaaactctttggactcccaaactttcacaaaaacatcctgaactacttctgaaatcacggaagatgaagtgacataaagtcgtgcaaagttataaaccttcagccaataaaggtcatacagcaaagaaaatgcagccgcatctcccgcttttaccttttccagaattattgtctcctccatctcttttcaattgtgttacaaaaataaagaaataaccattaaccacaacattttttttgatttttatttataataaagttaccttttttcctttaataatgtcttcaaaatctattctaattattaatttcaactaagttctgttagaactttgtttcttttcctatctacacatcttgcttttactctttcccatatctgttcttttattttaaaatctatagctttattttctgattcattccattgtattttaagttctctatccactgattccaggtcagcatagcttcttcgctgctttttagtcagccgtcctgccagcaaatctttaatcaaactcatctttgtatctttatccatcctatcttactttgttattattctatttattattactcgtatattataaatacacttgagttaagtctacccccacatcccttcgataaaaaaaatagcaaaactatcattaaaatcataataagctaatattcaacaaattaatcactaaccaaaaagaagtttttttttcgaaaagtcatttttttatcttagttctaacagaactaagatggtattttgccgtagcttcactcgctcttttactaacaataggaggattttggatgaattcagtcagagataatattaacgacgaatttataatggtgatagcacaacaaaaccaaatgcacgttttaccggacagtacaaaagtatggatggaatcaggtagttccattaaatacacaaaagcctttaacaaaaaaagagaagtatggctagaaggcaactcattttttgaagtatataaacatgaaggcagtttcttccaagtacatattaataaagcttttatagaagtaaagggaacctgttttcaaatcaagcaaactaatgctgaaaaaaatgaaatcacgctgtttcatggtaaaatagaatttaatgtagaatctacaggagagaaaattatcatgtctccatcgcaaaaggtaatgtataatcccaacaatgcacaaacattagttgagaatgtaatggatatcaattggaaggacggaagatacaacttcaaagaaaccccattaccccagctcatttcaattgtaaatcaaatataccaatcaaatataattctagaaggaaagtttactaaacaatcttcattcacaggtagcatccgttatgatgaaacattggatgacgtaatagagaagctttgtttcagccttaacctcacatacaaaaaacagaatagtaaaatagtaatatataattaaccatatttctaataattaacccaatatttaacctcacaacaagttaaatcatgaaaaaaaatcacagttgttaccggaggcgatatctgaagcatatcgcactcgttttgctcttttaccccttgtccgctcttggagctcagggacacatatctatcaaggggcaatcaatcactattatgcaagctatccagcttatagaaaaaaacagcgactacacgtttttctacaatgcagcagatctcgaagacaaacaacggaaagacattaattgtaatggtcctattgacgagattctggatgaagttttcaaagacagcggtattagctatatcgtaaaaaacaaagaggttattctcaacgtacaaaaaacgaataacacccaacaaaagaaaaaacgtactgtaaccggtactatcatagacgcagtggacgatagccccatcattggagctaacatcacgattaaaggtgacaagaacaccggtacaatctcggatattgatggtaattttagtctttccatacccgacaataagacgatccttgtcgtaacttacatcggatataaaactcgcgaagttcctgtagaagatctagggaatatcaaaattgtactggaaggagacgatcataccttgaatgaagttgtcgtagtcggttccggtacccaaaagaaggtcagcgtaacaggagctatcacaagtataaaaggtgccagcctcaaactgccgtcatctaccctgtccaactcatttgccggaaagctggcgggtgtcatcgcaaaaacaaactccggagagcctggctccggtgccgaattttacattcgcggtatcggtacttttggtggacgagcaactcctctgattttattggatgatgtagaaatatcatccggtgaccttaattatgtaccagccgagaatattgaaagcttctctatccttaaagatgcatctgccaccgctatctatggttcacgcggagctaacggtgtaatgatcgttacaactaaaggaggagaatacaacagtaaaacatccatcaacgttacagcggaaaattctttcaactacttagacaagttcccggaatttgtggacggagctacttatatggatatgtataataaagcttcattagccagaaactcttccgctacacccaaatacagtgctacagacatggaacgcacggcatccggagtcaacccatacctataccccgatgtaaactggcaagacgtattgttcaaaaacatgagtatgcgccaacgtgccaacgtcaacatttccggtggtggttcaaaagttaaatattacatgagtttggatgtcagccatgattcaggcttgctgaacacagggaaagcatattcatggaacaacaatattaatataatgaactataccttccagaataatattgcttataaactgacgccgacgacaacaatcaaaatgaatatgaacgctcagatccgtcagaaaaaaagcccgaatgtatcaagcgaggatttgttcaaacagattctgactactacccccatagaatttccggttacttatccaagtcaggacgggcgtatcatgtacggcaataacatcatctcaggaagtaccttatacacgaacccctatgccaggatgatgacatcctttgccgaaacgaacgaaaatacacttaacacagttatcaagatagaccaggatttggattttatcactaaagggcttaaaattaatgcttttgtaaatttcaagacctggtcaagttcttactttgatcgtagcattgctccttattattatcgcataaaaagcggaagctacgatgaaaccgacctggaaaatacgaattatgaattggaactgctaaattcgaatggcagcgattatatcagtcagtcggctatcggaaagtcttccgaccaaacatttgaattacagttcaacctaaactatgcccgtcaattcggtctgcataatgtaggtgccatgttactctacaaacaacgcgaatacagaagcgacgtgttacccaaccgtaatcaaggcctttccggacgtcttacttatgattacggacaacgctatctatttgagtttaacttcggttacaacgggaccgaacgtctggccaaagaagaccgtttcggattcttccctgccgtgtctttaggatgggtgataagcaatgaagctttcttcgaaccaatgaaaaatgtagtggacaatctcaaggtcagaggttcctacggtcttgtaggtagcgacgacctggcaacagccggcggaagttattacctgtatatagacaagattacaaacaacgacctgtcttatttgaaatggacttccggacaaaatatggactaccaattaggaggtcctcagatggcatactacgccatgtccggtttgggatgggaaaaagtaaagaagctcgatataggtattgattttacattgttccgcaactggacatttaccttcgattatttctacgacaagcgttatgacatcttcatgaaccgtgaagcatggccgcaatcactggcttatcatattgccaaaccttggagtaatattggtaaaatggataataagggagtagaattcagtattaattatgccaataacttctccagagatttgtctgtcagtctacaggcaaacttcacctacaacaaaaataaaatggtctatgtggatgaaccggaatatccgacaatatggaagtcagaaaccggaaaaccttattcacgtattaccggctacatagcagaaggcttattcaagtcacaagaagaaatagataacagccctgcccagaatttgggttctacacccaaggtcggagatattaaatatcgtgaccttaacggtgatggtatcattgattcggatgaccagacgatgatctccaaatatggaagtactccacgcttacaatacggatttggcggaactgtcaactacaaaaagtttgattttggtgtcttcttcagtggctctgctctgcgttctatcatgacaaacggtattgaccctttccaagaaggaatagccgtcggtaacagaaatgtattaaaatatatagccgataattactggtcggaagaaaaacagaattgggatgccaaatatcctcgtttgggactacttgcaacagacgttgccaacaatacaatgaacagtagttactggttgagaaatggttctttcctccgattgaagaatgtagaagtaggatataagataccttacggacgtattttcgtcagcgcagccaatctattcacctttagtccgtttgacctttgggatcctgaactgtcttcttggaacagttatcctatgcaaaaaactgtcaatgtcggaattcaacttcagttctaatttattatgagaaaaaatatgaaactaacacgcatctttcaaaatataagtatagcagttattatcactgcattgggcttaacctcatgtgattatctagacgtcgttccacccgaacaacccaatatcgatgacgcaatgtcaagccccacccgagctttaggatttctttattcctgttatggaggtgtcagtacagacttacccagtgcctatctgggggaaataaactctacgacagacgaatatgtattaccttattcatggaacacagacggttattggggcgcctatgcatttaacactgcatcatccactaaccaagactggctatggggaactacttaccaatatataggacaatgttatctgtttttacaaaagttggaaaatgcgggaagcgacattgcatctgatgcagaaaaggaacaatggagagccgaatgccaattcctggtagcttattaccacttcgctactttaagaagatatggtcccatcccaattacagactcgtacattccgatggataccccaacgtcagagtataatggacgttttcactttgactattgtgtagactggattgcgaaccagctggatgaagccgccaaagtacttcctgccaaccgcaccgttaccaatgaatggggtcgcgctacatctactatagctaaagctgtaaaagcacgtttgttactttatgccgcatctcctttatggaacggaagtttcccctaccctaactggcagaatgagaatttcgagactccgggttacggtaaagctttggtaagcaatacttatgacaagagcaaatgggaaagagcactggccgcatgtcaggaagcacttacattagctacaacttccggtgaccgtgaactttacgatgacgacgaatattactcccgacaatccctgaacttaccttttgttcccggagtagcagacgtggaagataataaagaattcctgaaaaacgtaatgaagatgcgctatgccgtaagtacacgtgaatctgaaggaaacaaagaaattatctggggattatccaaccagtttgatttttattcccgttatccgcttcgtattctgaagaaatcggatggaacatggcatgctggttatagtggtgtatctcctacattatatacgttcgaacatttctatacagctaacgggaaactacctgaaaaagaccttgactttactccttcctctgaatggtttgagtcagcaggtatctcttcacgggaagacattatcaaattgaatgtgggtcgtgaacctcgtttctatgcatggatggcttttgacggtggtgactacggaactaaatttgcggccggttctcctctgaaactggaaatgaggaattcggaaatgcacggttacaatccgtctctatttaatcgtgaccatagtgtcacagggttcctgacacaaaagtttgttgatccggtaactgaattctatacagccggcggttctacaagcggaacaagcgcacctactatcttattccgcctggccgaactctacctaaacgtagcagaatgccatgcagcattaggaaatacacaggaagccattgatgcactaaatcctgttcgtgaacgtgccggaatccctaaattaacattggctgatatcacaaataatatgacaataaaagactgggtacacaatgaacgttttgttgaattatggaacgaaggtcaccgcttcttcgatgtccgccgttgggcagaaggagccaagtactttggagcaaacaaacgggaaggattgaatgcagaagttcaaagtcccacattcgaagaatttaataaacgaactacagttgatgcaccttatgtgtgggaaaaccgcatgtacctgaatccggtattctacaacgaagtatacaaaaatccgcaaatggtacaagcacccggatattaattattttttattcattcataacaatatagaatatatatgaaacatatatcaatagcattgtgtttgtgcgggatgattctgatgaatacttcctgcgacaattatgacgatacctatccgcaggaatatgagaaaatactatcactgcagaccaccggtgagcaagccgtagatctttataaaacaggagaggctactaactattcaataacggtcattaaatccggaagtcaacccacattgacagcttctgcccatatcggtgcaatggatgcagtcaattttgagaagtatatctccgagagaggtttggactatgtggcaatgcctgccaattgttattcgttcaacatggaagaactcgattattcttctgctgaaacctataagatcatcaatttacagttgaataccaacgagatagaaatctttgagcagactcttgaagagggacaaacgtgtgtccttccaatcatgctgaccagtacatccgattccatcctggcggataaaaacacattagttctgaaaccggagattattactccctctctttcagtcactgaatccagttcaggaaccgtgactaaatatctgccccaaagtggaggcaccattgctcttgatttaggattgcaagtcgaaaaccaatggaatttcacctgtaaagtagcaattgatgaaactactactaccttagaaggagcaacgttggtttcggatatcatctcatttgagcctggaaacacatcttctgttcaagttaatatccctaagtttacgaagacctccggaaatgtgggtataaagattctggaaattaatggaaaagacggtttcgaattcgacacgaatccatttatactggttgcatctgttgaaaaatacagtctgacagcggacatgctttccagtaatgcaatagaaccgtcagaaggttccttagctaatttattggatggagatataggtacctacttccacagcgcgtggagtgtatcaattgccgacaagcattatgttcaagtaaaattgcccgtatcaactaagacattccgtttcacctatacaaacagatcaaataacggaaatgccgctttggcatggttcaatttatatacaggaacgaatgagaacaatttacaactttacaagcgttttgcgtgggatgaagatggtctcccgtcaggtgctgcaggagtttatgtttctcccgacgtttcaatagacaatgctgccaacaccttacgctttgaatgtgaaagcaactggaccggtggttccttctttgtatggagcgaatttagtctgttcatactgtccgaataataaatgagagacaaagggtgagtcagacttttgattcacccttttatacctcatctatcttaaaaactaatacagcaaaaaaatgacaataaaaagattcattactaacctgttagccctttttactctattcacagtttcactggcatgcaaggataccgaaaaatcgattataaatagctccttcagtatcagtgaagaatatctgatacaaaatctggataaatcaagtacgtctgtccagattccaattaacacatctatggagttagctcaatggagtgtctcttatgaagcaaactggctacaatgctcaaaacaaaagacagcagcagaaggaactttcctgagaattacagtgaatgaaaatacaggcgaaaccaaaagaacagccaacataaaagtaacatcaactactgctacctatactatcaccgttaatcaatatgccaaaggcgaagtaattgttgagggtgacatcaaggttacaccaaccggaggcaaagcgagtgagcatcaggagggacaggatattgaaaatacatatgatggcaaattttcaactgatggagctgcccctttccacactccgtggggacaatccgccaaattccctgtcacgctggaatactattttaaaggagatacggaaatagactacttaatttattatacacgatccggtaatggaaacttcggaaaggtcaaagtatatacaacaaccaatcctgaccgatcagattatacattacagggagaatatgactttaaagagcagaatgctccttccaaagtttcattttcagaaggcataaaagcgaccggaatcaaattcgaagtattaagcggtctgggtgattttgtaagctgtgatgaaatggaattttacaaaacaaatacggataaaacactggataaacaacttcttaccgtattcaccgatataacttgtacggaaataaagaacaacgtcaccaacgaacagatacaagctctgccagactatttcgtcagaatagcagaagcggttcgtgacaatacatacgacaaatgggaaaaagaatttcgcattcgcagctatgaaccatacagtaatattgctgaatgggcggataaattaatgactaagaaatatagtgatctcgacaatccgactggtatatccgtcaaggcaggagacgatatcatcgtattggttggtgacacatacggacagaatatttcaatgcagtgtatttgggaaacaggaacagaatacaagcaaacagcttcttcaggcgatgtctatatgctaaatcccggagtcaacaaactgactatgaaaggagaaggacaattgtttgtcatgtacaacaccgaactgacttcaaatacagcaaaacccatcaaaattcacataccactcggaagtggcacagtgaacggtttcttcgacctgaaagaacataagacagacgaaaaatacgctgaattattgaaaaaatcaacacacaaatacttctgcatacgcggtgaaaagatcatgttctatttccaccgcaacaaattattggaatatgtacccaacaacatcctctcagctatccatctatgggataacattgtcggctggcaacaagaattaatgggaattgacgatgtacgcccatcacaagtcaacaaccatttatttgccatctcaccggaaggaagttatatgtgggcttctgactatcaaatcggatttgtctatacctacttaggcaatatcttgttggaagataatgtaatggcagcggaagataacgcgtggggaccagctcatgaaattggccatgttcatcaggcagctattaactgggccagttctaccgaatcatctaataatctgttctctaatttcattatctataaattaggaaaatacaaatcgcgtggtaacgggttaggaagcgttgcaaccgcccgttatgccaacgggcaggcttggtataatatgggagacgcaacccaccagaacgaagacacagaaacgcatatgagaatgaactggcaactatggatttactatcaccgatgcgaatataaaacagatttctggcaaacacttttcaaactgatgcgtgaagtgaatatgaccgaaggtgaagatcccgggaaaaagcaacttgaatttgccaaaatggcaagtaaagccgccaatcagaacctgacagactttttcgagatgtggggattcttcgaacctgtcaatacgactatcgaacagtatggaacatacaaatactatgtaagtgatgcgatgattcgggaagcaaaagaatacatggcacaattccctgccccgaaacatgctttccaatacattgaagacagaaagaaaagtgagtttccaccgaatgactaccgctattcggcagtcggagatgtcggatattacactcaattcaaagaaaatcagaagataaccaaagctatcacggcagagctggcaggacgcaaggtctccatccaaaacggagatgaagctgtggcttttgaactcagagagaatgatgaaaatggaaaattactttatttttctaccttcacgactttcgagattccttcatctatattgatggtgaatgccaaattatatgccgtacaagctgacggaaaacgtattctgttataagaataatttaacttaacacacattacagatgtagaaacggcatcgctcactgttcgggcgatgccgaaaatatcattataacatagcgaatagtgcgactctttttctaccaaaaatatagacgggcaatgaaaatatctacaataattacactggattgattaattaattagtatttttgacaccgaaatgaaaaaccaattaataacccccaattaaaaattaaaagaaagatgaagaaactactacttaacacactcatcggtcttgcattgttgacctgccagaccagttttgctcaaaagacaaaagcaaagttctctccgattaaagtagaaactccggctcgtccggcaaatcagcaagatgtaatccaactcgttactcctaaacttgaaacagtccgtgtaggctttatcggattgggaatgcgcggtcccggtgcggtcgaacgctggacacatattccgggaactcagattgtagctttatgcgatcttctccccgaacgtgttgaaaatgctcaaaagatactggagaaagccggtctgccgaaagcagcttcctacgcaggagacgaaaaagcatggaaaaagctctgcgaacgtgacgatatcgacgtggtatacatagctacagactggaaacaccatgcagacatgggtgtatacgctatggaacatggcaaacatgtagccatcgaagtacctgccgctatgacactggatgaaatctggaagctaatcaacacttctgaaaagactcgcaaacactgtatgcaactggaaaactgcgtatatgacttctttgaactgacttcactcaatatggcacaacaaggtgtattcggtgaggtacttcacgtagaaggtgcttatatacacaatctggaagacttctggccgtattactggaacaactggcgtatggactacaatcagaaacatcgtggtgatgtatatgcaactcatggtatgggcccggcttgccaggtactcaatattcaccgtggcgaccgtatgaaaactctcgtagctatggacaccaaagctgtgaacggtccggcatacattaaaaagtctaccggaaaagaagtaaaagacttccagaacggagaccagaccacaaccctcatccgtacggagaacggcaaaacaatgctgatacagcacaatgtaatgactccccgtccttacagccgtatgtaccaggtagttggagctgatggctatgccagcaaatatccgattgaggaatactgtctgagacctacacaagtagactctaatgatgtgccgaatcacgaaaagctgaacgcacacggttctgtatctgaagatgtaaaaaaagcattgatggctaaatacaaagatcctattcacaaagaactggaagaaactgccaagaaagtaggtggacacggcggtatggattatatcatggactatcgtctggtatactgtctgcgcaatggtttgccactggacatggacgtttacgacctcgcagaatggtgttgtatggccgaactgaccagactctccatcgaaaacggttctgctccggtagaagttcctgatttcacccgtggcggatggaacaaagtgcaaggttacagacatgcttttgccgaataagccattataccttattaatatataaacttacggatagccagactgggaaaaagtcaggttatccgtaagttcatgttcggcactttactgattattataatcacctatatgaaagcagatattttaaaaccctctagacagactatccttcgggaagccaaagattatgtgatgatcgccgtaggtatgatactttatggcatcggatggaccgttttcctactccccaacgacattacgacgggcggagtgccgggtattgcatctattgtatattgggcaacgggattcccggtacagtatacatatttcagcattaactttttcttattgttgcttgcgcttaagttattgggattaaagttctgtattaaaactatttttggagtattcaccctgactttctttctgtccgttatccagcaactggcatcaggcgtttcccttcttcgcgaccaacctttcatggcatgcgtcatcggagcatcgttctgtggcggcggtatcggagttgcgttctgcgccaacggaagcaccggcggtacggacgtcattgccgccatcatcaacaaataccgggacataaccttgggaagagtcatactgatctgcgatatgatcatcattacctccagttatttcgttctgaaggactgggagaaggtggtatacggatttgcaacactttacatttgcagtttcgtcctcgatcaggtagtaaacagcgcacgtcagtctgtccagttttttatcatatccaataaatatgaggagataggacgacacatcaacgaataccctcaccgtggagtgacgatcatcaatgcaaccggcttctacacaggcagagaagtgaaaatgatgtttgtgcttgccaaaaagcgggagtctaccatcatcttccgactgattaaagatatcgaccccaacgcatttgtatcgcaaagtgccgttatcggagtttatggggaaggcttcgaccatatcaaagttaaataaaaaaagaaacaagattgaaaaacatgaaatacagatcatatcacctattactggcaggaatattctctctgttaacaacaggcgctatggccgaaaagacatccgacaaaccttactggcaggatgtgcaagttgtatcggtcaataaagaatatccgcgtacttccttcatgacgtacgataaccggactgatgcacttaccgggaagtttgaaaaaagcaactattatcagttgctgaacggtacatggaagttcttctttgcagacagctacaaagaccttcccgccaatatcaccgacccttccgtgagcacggactcctggaatgatatcaaagtcccgggcaactgggaagtacaagggtatggagtggctatctacaccaaccacggttatgagttcaagccccgtaatccacagcctcccagccttccggaagccaatcccgtgggagtctaccgtcgggacatcgatattcccgccgattggaaagaacgggatatctacctccacctcgccggagcgaaatcaggtgtatatgtatacatcaacggacaagaagtaggatacagcgaagattccaagaaccccgcagaattcctgatcaacaaatacgtgaaaccgggtaagaatgtacttacactgaaaatcttccgttggagcacaggttcttatctggaatgtcaggacttctggcgtatcagcggtatcgaacgggatgtttatctgtattcacagcccaaagccgccctgaaagatttccgcatcacatcgacactggatgacagttacaagaacggagtattcgctttgaacgtcgacctgcgcaatcatcgtccggctgcaaccaatctgacactggcatatgaactgctcgacgctcagggaaaagtagttgccaccgaagagaagacaacttatgtccctgtcaacgagacacgaaccctttcttttgacaagaatctgaccgatgtacacacatggacatcggaacacccgaacctttacaagctagtaatgactgtcaaagaagagggtaaagtcaatgagattatccctttcaacgtaggattccgtcgcatcgagatcaaacctatcgatcagaaagccgccaacggaaaaccttatgtatgcctgtttatcaacggacaaccgctgaaattgaaaggagtcaatatccacgaacataatccggaaaccggacattacgtcaccgaagaactgatgcgtcgggacttcgaactaatgaaacagcataatctgaacagtgtacgtctctgccattatccgcaggaccgccgtttctatgaactttgcgacgaatacggactttacgtgtacgatgaagccaatatcgaaagccacggtatgtactacgatctacgtaaaggcggctcattaggcaacaatcccgaatggctgaaaccacacatggatcgcacaatcaatatgttcgaacgcaacaagaactaccccagcgtcactttctggtcgttaggaaatgaagccggaaacggatacaacttctaccagacttatctttggttgaaagaagccgacaagaacatcatgcaacgtcccgtcaactatgaacgtgcacaatgggaatggaacaccgatatgtacgtacctcagtatccgggtgccggctggctggaagatatcggcaagaacggcagcgaccgtcctattgtcccgtcagaatatgcacacgcaatgggcaactctaccggaaatctctggggacaatggcaggctatctataaatatccgaaccttcagggaggatatatctgggactgggtagatcagggtctgctccagaaagacaagaacggaagagaatactgggcttatggaggtgacttcggagtaaatgcacccagcgacggtaatttcctctgcaacggtcttgttaaccccgaccgtggtccgcatccggcaatggcagaagtgaaatacgtgcatcagaatgtcggcttcgatgcgattgacgcagcatcgggcaagttcaacatcacgaaccgtttctacttcaccaatctgaaaaagtatcagatacattacagcgtactggccaacggaaaaaccgtcaaaagcggaaaggtatcactggacatcgctccgcaagcttcgaaagaattcaccgtaccggtaaatggtctgaaagcccgtccgggaacggaatatttcgttaacttcagtgtgatagccgtagaaccggaaccgctgattcccgccggatacgaaattgcatatgaccagttccgtctgcccgttgaagccgaaaggaatacgtacaaagccaacggccccgcattacaaactcaaacccaaggagacgaactgactgtttcttcttcaaaagtaaactttgtattcaacaagaagagcggtctggttacctcatacaaagtggatggaaccgaatacttcaaagacggattcggcatccagcccaacttctggcgggcacctaatgacaatgattacggaaacggtgctcccaaacgcctccacgtatggaaacagtccagcaaagacttccacgtgacagacacgaaggtaagcacagaagacaaagccgtcctgttgcaggcaacttatctgctggcagccggcaatctgtatgttgtcacctataagatatacccaagcggaatcgttcatgtaaatgccaaatttacttctaccgatatgcaggctgccgaaacagaagtctccgaagctacccgcatggctaccttcactcccggaagtgatgcagcccgcaaagccgcttccaagctggaagttccccgcatcggtgtacgtttccgcttaccggcacagatgaataatgtacagtatttcggacgtggtccggaagaaaactacatcgaccgcaatcacggaaccatggtaggcatctatcagacaaccgccgataagatgtacttcaactatgtacgtcctcaggagaacggacaccacacggatacgcgctggcttaacctgtctcccgataaaggaaacggccttgtcatcgttgccgacagcctgatcggtttcaacgcactgcgcaattccgtcgaggacttcgactcggaagaagcgctaccccacccctaccaatggaataacttcagcccggaagaagctaccaaccacgacgagaaggccgcccgcaatgtattgcgccggatgcatcacgtcaacgacatcactccaagagacttcgtcgaagtttgtgtcgacatgaagcaacagggagtaggcggttatgacagttggggggcacgtcccgaacctttccaccagattcccgccaaccgcgaatacaactgggggttcactctggtaccggtccgttccggcagtcaggctaccgaagccaccaaatatgattatcgataaccttagtataaattttaaagaaaagacccatgaaagatttatcaagtattgtagccaagttcaacacccaaggtactatcacagagatcaagcctttgggagcaggacttatcaacgacacatacaaagttaacacacaggaagcagacgcccccgactacgttctgcaacgcatcaaccatgccatcttccagaatgtagaaatgcttcaatccaatattgccgcagtcaccggacatattcgcaagaaactgaccgaagccggagaagccgacatcgaccgcaaagttctctctttcctcgtcactgaagaaggaaaaacttattggtttgatggagaaagctactggcgtgtcatggtattcattccgcgtgccaaaacgtacgagactgtcaatccggaatattccaattatgcaggagaggctttcggaaactttcaggctatgcttgccgacattccggaaacactgggagaaaccatccccgacttccataacatggaattccgtctcaaacagctacgtgatgcagtcgctgccaatgctgccggacgagtagccgacgtacagtattatctggacgagatagaaaaacgtgcggacgaaatgtgcaaggcagaacgcctgttccgcgaaggaaagcttccgaaacgagtatgccattgcgatacgaaagtaaacaacatgatgtttgatgaagacgggaaagtgctttgcgtcatcgacctggatacggtaatgccgagtttcatcttctccgactacggtgatttcctccgtacaggtgccaacaccggagatgaagatgacaaagacctgaatcgtgtgaacttcaacatggagatattcaaggcattcaccaaaggatatctgaaaggtgccaaatcgttcctcactcccattgaaatagagaatctgccttatgctgccgctttattcccctatatgcagtgcgtacggttccttgccgattatatcaacggagatacttactacaaaatcaaatatcccgaacataatctggtgcgcaccaaggcacagttcaaactacttcaaagcgtagaagaacatacaccggagatggtggcattcatcaatgagtgcttggttaatggataatggagaatggaaaatggataattagtggaaatggggcggagctgtttatttggtaaacgctccattcttccactgataaacaataggacggcggagaaacggtttaagtttttctgccgtttcttttgacatatagtcgggagtggacagagtgacagccagttctgtattttccttgttcatatccactttcatcaataagatgtctgcagaacgggaggcctcgtcaaattcgtatatcgcagtggagtccggagtaagcagaaaatcgttcatgaccggcagggtgatgaatgaatcggcagtcagaggtttccagtctgtagtatagaagcggatgctgctgtcacaagccggagcacatgccgtagctaccgtacaaatcacattcgtggtatcattcaaagccaatactttcatctgccaagtggtttccggagtcatctgcatccggatatagtccttactcagatcggtcatttccgatttctgtccgaagcggttttccacttgcgctttcattttactgctcagaaagtcgatgcagtcttcacggttcaccttcgtaagcaagggacaaagtgaatctggtacgttgataaaaagagtctttgcttcctgcgcctgtgaagagacaaaagtaaacagaccgatgatgaaaaatgcgatggtataagtgattttatttgatttcatattgtactttttatttagaccccaaatataagaatatcattccgattaacacgaggataaggtcaatcgctttgctttttaaattcttttcacggaagaagagcgctccgaaaatgaaagatacgatcacgcttccccgacgaaccatcgaaacgatggaaatcatggagtcatcatagctcagtgcataaaagtaaacaaagtccgcagccgaaagaaatacggagatcagaatgatggtccagtcccagcggaaaggagtggtcgtcttccgtttgggccaccagaggagaaagataatggttcccatgataaagaactggtagacattataccacgattgcaccagcatcggattcaactgtttcatcagaaacttgtcatacaatccgctgacagctcccatgactgctgccagtataataaagagaatccatttgttatgcttgaaatcgatcccttctttcttccccgaacggctcaacataaagaaggaagccactgccagcatcactccgatccattggtagagattcagacgctcgccaaacaccagcatcgctcctacaagcaccatcaccggacgggtggcattgataggccccacaatagtaataggcaagtgtttcatcccgaagtaaccgaatatccacgatgacagaacgataaacgacttgatgataatatatttatgctgctcccatcctgcaacgggaacattaaagatggttcccccaaggagatcaggttcaaatgccgataccaaaatgaacggcagaaaaattagactggagaaaagcgtattcaaaaacaatacaggcaacaccgcattatctttcaacgactgtttcttgaatacatcataaaatcccagcaaggtagccgagagaaaagctaataataaccacatgttgaaataagtaataagtattaagtaataggtaataagtaataggtgtcaagtaacaagtatcaggtaataggtaataagcactgggtaatacttattacctattacttaatacttattacctattacttatttcctcttccggatattctacgttgacaaggaagagcgcatttcccggagcggaagttcctgctttgcaacgatcctgttgttctatcactttacggaaaccttccacggtcagtttgccgcgtcctacctcgagcaatgttcctacgatggcacgcaccatattacggagaaagcggtcggcacggatagtaaatacccaggtggtgtcttctccttccatcttcgtccattcggcatgggagatgtggcagatgtttgtttttacatctgtatgcagtttgctgaaacttgtaaaatcgatgtattcgaacagggtacgtgcagcctcgttcatccgttcataatccaatgaaccatagacacggtagcggtactggcggttgaaaggatatttggcggtagtcacatagtacttatacgtccgggcagtcgcgtcaaaacgggcgtgcgcatccggtttcacctgacggacacgatagacagaaatatcaggaggcaacagacggttcagcttgtcggcaacggtcaccgtatcgagcacgtcttcatgatcaaaatgtgccaccatcagcgaggcatgtacccccgcgtccgtccgtccggcacctatcacttccacatcacgacgcagaaaagtagacaaagccttcatcaagcattcctgcacactactcccgttgggttgtatctgccaaccgtgatagttggttccatcataagccaaataaataaaatacctttgcacgccgattcctcattttagggttttcgactgcaaaagtagtcatttttttattcatacgtagaaggagtcgtaccaaatgcatccacaaaatgtttgcggaaagtcggaatgtcattataccccaccatttcggcaacttcctgcactgcatattgtttcgttttcaacagcactcccgcacggcgcatacgtactcctctgatcagttctataatggtatagtctgtactttgcttcactttgcggtagagggtaggctgactcatattcatttccgctgccagtttcttcacgctaaagtccgcctcgcaaatattttcttccacaattttgataacagctgtgataaacggatcttccgtcttcacttcctcacccgcctgttccggttcgctcacgacaattgtatccgttcccggcaatttgaacaacttcgtgtacatctgcttcaacgtctgacgaccattaatcagactgctgactttcgccttcagaatgcccggagtaaatggtttcagtacataatcatccgcacccagctgtagtccgtgaataatatcgtcgtcttctacctttgccgtcagcatgataaaaggaatactgcacgtttccggattctccttcacctcccggcaacattcgaaaccgtctttcaccggcatcatgacatcacagatgatcaagtccggcatctctttcattgccgtatcgactccctcctgcccgttggttgccatcaacaagttatattcattgccgaagagcactttcagatacaggcggatatccttatgatcttctacaatcaatatcgtctttttaactccgcccgctacgggggatgctacttcttcggcaggcaatgcctccgcaaaaagcggcagttgctgatcctgttgcaccacagcatcctctactgccaaatcctgtttctgtgtttctgccgattcgggttccggctctgctacttctgtcagttcttccggatcaataaactgaatattcggattgttttcaaagacatctctgtcggcgggaagattgaccgtgaccttcgtcccctttccttcagtactttcaagagtaatcgttccgtaatgagcttcgatcatctgttgcatgatggtgaatcccatttgcgcagccgacatatcacgttccgatccttcattctcgctcatcaactgctcaacggttcttaccttttcttttccgtcatcttctactatcaggcagacatagtgcatattgtcattcacgacctcacaaacagataaagaaaccgttcccgcataatgcgtatgggtgaaagcatttgtcaacagattatgaatgacgaattctattttctttttgtccacataaaattccatctccttcttgattctcttctcgcaatggaaatcaatggtatacaccttcaacaagtcccggacaccaaaaagagaactgtcgatcattttatccaccgaatacggagcaacttccagttttgattccatattgccctgcccgtatactgccagcaactggtcgcaggcatccaccatgcggagtgagttccggtacgccacctgtagagaaagctgagaagtctgagagtcatccttctgcaattccttcagcggagcgatgatgagtgacaacggtgtacgcaactcctgtacaaagagcatcagcaaccggttcctcatcgcttctatctctttcttttgttcctgtttcagcttttcgagattcaaattctccttcagtatcatctcacggtcacgatgaatctgtttgcgctgatccttctttctgaaataagaatagaagaaataagataatccgccaagtaacagaacatacatgatatacgcccatatagtctgataccatttacccttcaccaccagaggaatctcgattacctccccttctttcccatccgggaaaaccagcttagcctgcaaggcatattttccggcagccaatccgttgaaccacagtccttctgcaagcggtatcattttccattctttgtccgcaggaagcagacggtaagcaatcttgcgctgtgccagtccgtaacgcagatcggaaaagaacaaatgaaagtcgttgttatcggaagcaaacaccagtttctcctgtttttccggagaaacagccagaatcatctgcccgttccgcttttctcctgccagcaccgtttctccaccgacttccacatcggtcagcatcaaatgcttcttgccactatcgcctttggtagcagaaggatcaaagaaaatcagcccccaggaattcgcccataacaagcgtccgtcattcaaacgacagactgcactgcagtttcccaccgacagataactataaaaagcctcctgtccatttctgatggtcatcactcctacattgtttcctgcccatgtgtttccgatatggtcgtcgaccatgcaactgacatgtccgtccgtcaatccactctgtagtgtataaacagattctatcttatccttctctcttccgtcgatgcgaataacgacgttcagataggctgcataaatctgattatagttattcacatacagggttcgcactccggcttcttccagcccattctccttttcatagtttccttccacccgtatctggtcaccgttcgtttcaattcttttcagccctttatccgtacctacccatacatttccttccttatcttcagtgatggcaaatacattcttgatttcaccgggcagttttatatttttgcatccgtgagttttaggatctacctgtaccagtccattcgaagtacctacccacaaacgattccacgaatccagacagaaacaatggacaacagcctgcatcctcccgccttcgctgtttttcaactgaaaagattccacgtcttccgtaagcggattgacagagatgatctctccaaaattgttacccagccaaatgtttccatctttacctttatatatgtgataacgtccggagagaccggatacttttttccatggttcaaaatgtgtatccatcgaaaatgacggagtagtgcttctcatgatgcctccatcggtcaccgtcaaccagatatacccttttgcatcttcgaccatgccatccactctggatttgaaattctgccgtacccggctgtacatactgtcgctgatatcaaactttaccactcccccgccaaaggtacctacccaaagaatctgctgcctgttatcccatagcagactggtcatcttattttcgatccttgaatggaacgctctttccccctgtgtcagtagtgtcaatgtaaacgggctctcacacaaattcagattctcaaaatgcaatttatataatccgtcccatgtcgtcagataaaacgtctgcttatctttcatcaccatatccgtaacatacgagttggagaaatccggctggtcgccccccttgagagagactacacgttccttatgcgatttaaggtcataacatacaatatcattccataatctgcatatccataaatatccctgtcgcaaaaagagtctgttcaccacatcatattctctgatcacagaagttcttttggttacgagatcataatgtatcaccttttcgcggtcaacggcaaagtacaggtttgtttttccatccgtgcaaagattagtaatctttccttttatcaaaggttcgggattcaatatacaatagacgaaatcttcttttccttctttcttgcggatgggacgcgattcgaacaatccatgcgaagtagccagatacaggctgccatcattccagcaaaaatcctgaatctctttaagtttcagcggcctgtcaaaacgtacaggcaaaaacttttccatttctttgtcaaaacaggttattcccccctgatagagtgaagcataaaataaaccgtcagaaccttccttcagcgtttttacagcctgatgcaaaggagtggaaagggagtcaacgctcataatgagcggataatcacgaaatctgaagccatcgtagcgggagattcccttgtcggtagagaaccacataaagccttcgcttccgtaacaaacatgataaatagtattatttccgactccgtttttaattatttgcggttccaggtcccagtgggtatctatagagtatgacggaagaaaaaccgtcaacagcaacaacagaaagaagaacttcctcatatcttaattgtattttgttcatgtgtattggctgataaagatatataattaaatcattagcaaatcggataacaaatattttttagcaaaaaatcggcataagacgcaaagaaaagcaaagttctacttgaataattggaggtcagtattttatatgcagggcggattgaaacaaactttggcataaaacgcttgaaaatacccctttcggacaaagttcggctactaagcagctaccagtcctaaagaggatatatgggatataacaagttctgtttcataactatgcgttgttttgcataactcttggtaacaaataattaactacctttagaaacgaaaattttagagttatgaaaacaaagagaagtacgtttgcaacctcgttctacatcaagagatcggcagtgagaaaccgggacggaaaagcccccatcatggtgaagatctccattgatggggatgacaaagtattgggaaccaaactattcgttacgccggatttatgggagaatggtaaggcaaaaggcaagtctgccgaggcgacagagataaacgggcagctcaaagaagtcagtgcccggcttaccaaccactatcaccgcatcctccgggaagaggattttgtcaccgccgaaaagctgcgtaacgcctttctgggtatcggtgtgatggaaaactgtatcctgaaagatttcgagaacatgaaccgggaatttgaggcgatggtggagaaaggacagcgtgccaaatccacttacaacaagtacttggccgtgtacaaccattttgccaccttcctttgggagaagaagaaacgaaccgatatggcttacaaggaactgacaaaggagattatcaccgatttcgacaagtacctgcgcgtggaaaagggattgagtgacaacactctttggatatacaccatgccactgctcagcctgacagacaaggcatggcggcgtggtatcgtccgttccgaccctttcggcgagtacagccttgaaatgcaggagacagaccggggctacctcacggaagaggaactgcgcaccctggctaacgccgtgttcgtgaaaaaacagaccaacctcgtacgtgacatgttcctcttcgggtgcttcaccggacttagctacattgatataaagacactcacccatgacaagatccagcgcatggacttcgacggcgaggattggatcataacccgacgcaccaagacccgtgtgtcgagcaacgttccccttatggaaatagccaaggaactgatagaaaggtacaagggacttgccggaggcgatttcgtatttcccatgccctctaacggtacatgcaacaagcacctcaaacagattgccaaagcctgcggcatcagcaaggagatcggattccacctgagcaggcacaccttcgccacgaccgtctatctctgcaacggcggcacgatagaggcgctctccaagatactcggtcacaagcacatcagcaccacgcagatctacgctgaagtaaccaacaagatggtaagttcagatttccgtgcaatctccggcaacctcgccgccatgcagcggagcgtactggagaaaagggacaggaagcaaggtaggaaaaaggtgcaccggtccctccgggaaacggcttgacacctttctccatgcgaaacacggcaaaggcaggaaccccgatacagtgctcctgcctttgctgcattttccgatgtatatccccgtgcgtttatgttggacttttcccccgtttgcgcttttgtctcatgtccacgtaattttcttccagcatacgcagcagatccgactggcggtaaagcgtcttgcctggcagcgatatgtacgggatcaaccgttgtgtgcggtagccctgcaacgtccttgacgtgatatgtaacattctgcacacatcctcacccgtgaaatagacctcgccgttcatcgccggacggaaatgcgccgtcaccgtatcaatatacctcatgccctcttccagagcctcgaagtacgcacgtacctcttccgtgtcttttgttatcacttccatgtcactcgtcctccattatttcccggctcatggattccacgaatacctccacgtcctccgtccggtagtaaatcttatggttgatctggctgtacggcagcagtccccggtcacggtaggtctgcaacgtccgtttactgatccccagtttctcgcacacgtccgccccgtccatccagttcatcttcccgggcgggcggtaacgggcgcaaagttccttcacgtgccgtgagaagcagccgaaccgctccttcatctcctcaaaggtcttcttttcaatacttactatttccatcgttctgatacatttttcattatacttccctgcaaatatatggattcatataaaactatgtatcaaaaccgtatagcttgtcagcgttttgcttcacgttcgtagccttgtcgtaccccaaacgatgaaaggcggggaaaagtcctacataaacgtacccagttcaagggtacgcacgagaacggaatccatagcaccaattccggatggttcaaaggaaaatgtgtactacgcaccgacttcaccctcatccagccacgatgcaagttgatggggcacggggcaaatttcgtcaccggcttgccccttgtcaaagccatctctttcgaaaacggactggaatagttattttacttttgcggtaatttcatctatcaggttcgtgatcttctcaatggaatacttttctatcaatctcctgtttgccgcttctgcctttagtctttcattgattaattttagttgtggcaaatctgattgacaatatttgctcaagtgttctatttcactgccccaagaggtatatttataacggaactgtaaaaaatgcagaaaggtgttacgtgattcgttggacaatcccaaaatactttttgaaaccttatccgcatcagcctcttggaatattgaagtatccctataaagacgctgtttgaccgggactacatcattcaatgccggattcaggcgttcgcaagtttcatccgtcagattttccagcatgacagacactttattagggcatttcttcaatctttgcccgaatagtttttgaaaatacgcaaccagtccattcaaaattcgatctgaaccaatattagaatgattccttcttgtacccgcatgtacctttgagttacaattcaacaaaccctccatgtcgctgataccttccatcagcctgtctatggagtgcttgccttgggctatgatgtcttcctcggatacgtgaacaaggttgtcgctatataaaaccgatagtacagatataatgacaaacaattcttttagatcaacgctttcatccgcaaagtaatatcgtaccgtttccccgtagtgtttctcgtattccccgttatccagtctccaatagtcgtacaggtaatcccaactgttcaaacttgcgtcttcggctgcaaaatattgttgcaggtaggtcgtgtcaaaatacccgctttccagatagcagacaatttcattaacgatgaatctatcaaaaatatccaactgtttacctatctctataaaacggtatttggagaggattttttcacgctcctcatctttctctttatccgggaacatgtcatacaggctgttgaataggcttccgatccgagtattcccacccttatactcgcagtaaacggcgacaaaatttgccaacaacgatgttatgacaagtttgtacttgggagatttatgataatgctccggcaaagccatggctatcctgtgataatcgtttagacattgccgcaggactcttaaattatcgaatttagaggcatggaatatcttgatgataagctctttgttctcagacaagaggttcctgttgttggtggatatctcgccaatgaagaaatcgagtgtctcccctatatttaatttgatctcaaaagtgcgcccgatagtcttttccttgaaatccttgaatttcaacttgcacttatcgtcctctttttcggaaatcttgttctcatcgccaatgatgatgaccttgcatttacaatgttccgaaaagtaattgatgtatcccaacaaggtttccagttttacatcacatctttcaaggtcgtcaaaaatcagaatcttgtttccttttatttcggaattttcttctttcaacaacaaaatggagtccaagtcacaggttacactcccttcatcctttccgtcaccgtcgatgtcatatttcaaagcgattttcgaggcggcttttaatatattcttggcaagtttcattcccttgctgtacagccacggggatatttccttgttgacttgttctgtgatttgctgggtagtggtcaaaccatataaagacacatatatgggccgccattttaacttgtccgcatctttatcgtttttcagttgctttatccattggcggataaaaaacgttttgccgcatccccaggcacctcgcagcatgatggcatattgcggatcggatatttccgcatattcatttaaaaaggtgagtatgtttctattcatagccatgttcattagaggtttcaaaattacggaaaagaggcataattctgataacttttaagaaataagttattacggtcaattcgtgtttccagatgattgtcggagcgttccccttcgggtcgggctttccgctgcaagtcctcgctatgctgtgggctttcccctgcaatccctaacgtgggtgaaagggttttcactgtcttgcgcttacaccttggcgcacgggctgtcccgtcccggcgtccgctgccgaccactcagtgaggctgcatggccgaaaccggacatcggggcggaaggacaaacggaacacggggcttcggctatcgccgaaacttcctgtgccccgtcccgcccaaaagagttccccggtgtttgtccggcagccggaagctgaccgtcttcccatatacttctcccgcacgtatgtccttgcctcgggaaacgggcgttcccggctctccggaaggcttctttttcccgcacccggcaagtaactgaccattgactggaatgactgacagggcattttttccctaagctgattgggaaaacattgacgaaggtaggcggaggtgaaagcaaatccgcaaaaaatgccaaatctccaccctgcgggtagtatttaccattttttcagatgattgcaattcaccttttccgctatcaatgattgtcaatgttcttcccaatcagccaagggaaaaaaattggttggggcgacaagcgatgaaaacagagtaataacgattaaaatttgtgagttatggcaacaacgaacagcaccatcgaaaaaattgcaccgatgttcaccgagttgttgataaagaaaatcgagtgcctgaaaacggattggcaaaaaccgtggataacgagccttgaacaaggtttgccccgcaacatcagagggacgctctataatggcggcaatgtcttgatgttattgttctacaccgagttcatgaaattcactttgcccgtgttcctcacgttcaaccaagcgaaggaagaggacttgagcgtcagcaagggcgcacgatcgtttcccgtctattattggttcaagttcgtggtacacaaggagacgaaaaagacaatcaagtacgaggaataccgcaagctgcccgcaaccgagcaggaaaattacaaggtcatcccgcagatgaagtattacaacgtcttcaacatcgaccagaccgattttgcagggaaataccccgaacgctacgagcgcatgaaaaagggagagcagcccgaagactattcggacagaatgatttacgaggcgttggacgagcttgtctatctgcaaaattggtattgccctatcaaggtgcagtattcggacagtgcctactattcgccctcttccgaccatatcgtttgcccgcagcgtgagcagttcccgcagggagcggagttttacggcacgctcctgcacgagatggcgcacagcacgggaagcccccagcgactgaaccgcacgttcggctgcttcttcggggatgcgctctatgcccgtgaggaacttgtcgccgaacttaccgcagccctttgcggtgcgttcttcggctacgcaaccgcaccgcaggagaacaacgccgcctatctgaaacactggctcaccaagctaagggaggaacccgcctttttggtggagatattgggggacgtgaacaaggcggcgaagatgattgccgacaaggtaaccgaaccggtaaacgaacccgcagcagcctaagcgggacaacaaaggaacaagagtataaaccaacgggcggagcaatccgccccacttaaagacataagacgatgaaaacattatcagaaaaggaatttaacggctttaacgttaatgcgatgtttaccgaaagagcggaacgggcgaaaaaagagctgtctccactcatgcaggagataaggaagtacataccccaagcggaatacggctaccacgtggagagcggtgaatatcccgcattttacggcgtgcgcatagagttcacgtataacggcatccgtttccatgtgtgcaagatatacaaagagaacaaatacaggatagccgccgacatggagcattttgaatatgtcaaccgctacgacatcgaaagggcgggcaaccaatacgaaaagccgtgcaatatcggcgtgttcaccgccaagaaaataaacgattggataaactactacacgcagatatacaggcaggtggagcaagaaaatgtggagaactcgaaaaaggtcgccgatttcttgaaaagtatcgagaatgaacccgtaagatgggaagggaacaaccattcaaaagggacgataatccgcaacggcttgcgcttcactttctacatagaggaaggacacctctattttgaactgtccctaagttatcggggaacggctgattacgacacgttccggctgatagccgataaccgctatatcccgaaaggaaactattaaacaaccacgggcggattcctccgcccgacaatacccgagaacatgaaaacgacattcatttacagactggtttaccgcctaatcctttgggcttcggcggtgtacttcctcaccaccaccgcagggcagttttttgccctatccgctactttgcttctgttaggcttcgtggcacggcttgttttcgcccttgcgtggcggttgtttgtcggcttcatgttcatcttgataatcattcttttaatcatctgaatcatggaaggaaagaagtttaaacacaagtatctgccgtacctcacttgcgtggtcgtggcagccacccgaaaagggtacaaggttttggaaacccaagttttgggcgggcgcaggaagcccaaaacaaagacagcctactactacgacattgattttgataaagagcgtggtttgtggcaggaagaaggcaagtaataaccgataaaaaaatatcaatatggaaacaaggacattggcagaaaacggaacacccgttacgaaagaaaagacggtagccttttcgggacaccgcaccaaccgtatagccaagttcacggcagaccgtgagaaactctttagagaggtggcgttcgatacatttgtagccatcgagagttattgtatcaaaaaaggctaccatacctttttgtcgggaatgtgcgagggcttcgaccttatcgcagcagaggaagtcttgaacctcaaaaaggaatacccgcatatccatttgaaatgcgttctccccttcaagggacaagccgagcggtacacccaggccgacaagcggcgttatgacaccattttggcgcaagccgatgaagtggtaaccttgcaggacggatataccgagggctgtttcctacgccgtaacgactaccttttggaaaactccgcttttctgatggtctattacgattcggtagccgtgggcggcacgttctacatcctcaaacgggcggtagagcagaaaaagaagttcgcgaacgtgtgctataaccgcaggtaagccgcaagggcggactttccgcccgctactttctttcgtgagccggagcggggaaagaaagatagcaaagaaaccgatttcccgaccggaagaaattatcaaaaagaacaagaataaacaatcaacttaaaaacaaacggattatgaagacaaaagcaaatcaatcagcagcagagagaaacatcacgatggtagcattggcaaacattcagccgagcggtttcaacccacgcaagcgtttcgatgaaacgagcctttacgagcttgccgagagcatcaagcggcagggtgtgttgcagcccatcaccgtgcgccccgttgacgggacagaccgttacgggattgttttcggggaacgccgttaccgtgcgtccgtcattgcgggcagggacgaaattcccgcaatcgtttccgagttgtcggacgaggaagccgaggaaatggcgattactgagaacttgcagcgcaaggacgtgacacccgtggaggaagccgcagcctatcagcggcttatcgagagcggacgccacaccgtgcagaccttggcggtactcttcggaaagaacgagaactacatccgcacacggctgaaattcaccgcccttatccccgaaatcgccgccctcttggatgcggatgaaatcaccatcagcgtggcggctgaaatctgccgatacggggaggacattcagcgtgaggtgtacgagaaacatttgcaggacgagggaacgtataacagttggcggggactgaaagccgccgatgttgcaaggcgcattgaacagaacttcaccaccgacctgcaatactaccacttcgacaaggccgagtgcgccacgtgcgcacacaacaccaataacttgctgttgttccatgacggcgggtgcgggcattgcgccaaccgcacgtgtcttgccgagatgaacgcctctttccttatggagcgagctgtgcaaatcatgcggaaccagccggaggtgtcgctctgccgtgactgctacaccgccaacgagacggtagtagaacggctaaccgcttcgggctacgaggtggagacccttgacaggtacaccgcctttccaagctgccccaaagaacccaaagccgaaaatttcaacgaccccgaacgctacggggaagcccgcacccgctacgagcagcaatgggcggactacatggagcaggaggaggaaatcacccgcaggagcggagcgggggaaatcaccgtctatgccaaaatcgggcagaaggagattacattctgttacgtggagaacgtgacagagaccgagacagcggacggaacgcccgcacccgcaccgctctctcccgtggagaaattggagaagcaggacaagcgcaataaggaaatcgcactcgaacgcacggtggaggacaccaagaaacagattctcgaagccgacatcacgggcggcaagttcagtgccgatgaagacacgatgctgtacttcttccttctgtcctcgctccggaaggaacacttcgcagccgtggggattgcggaagacaagccgtatatcacggacgaggacaagatggggattatcggaaacctcacggtaaagatgaagaccatcatccgcagggacttccttgtagccaacttcaagggagcgtacgggaacaacaccgtggcgaccctcttgcttgacttcgcacgcaggcacatgccggaggaactcgccaacatcgaaagggagtacaacggggtgtacgagaaacgtcaccagcgcatcgaggaaaagaaagccgtcctattagtgcaggaacgggcaagggagcgcaaggtaacgcaacccgaggaacaaccgcaacccgaagagattgcagcctaaagacaaagggcagggcggagaaatccgcccgctactttctttcgtgagccgtagcggaaaagaaagatcgcaaagaaaccgatttttaaactttcaaattttcaaacttatgcgaaccgtacagagaacctatacactattcggcattgcggaactggaggacgaagcccgtcaaaaagcctataccgactggcttgccaagggaaacgattacccgtatgcttccgagaactgcgacacgctcgaagccttctgcaaccttttccgcattgcctgcaccaactactgttacgacagttgcacatacgcttaccgtttccataccggacacgaggaggagaccgaaaggctttcgagcgtccgcttgctggcttacctctataacaacttccatgcggagctgtacaagcccaaggtctattggacgaaagaccgcaagaaaagacgcaggagccgtatctccgtcacttgcgaatgccccttcacgggggttgtgtcggacgaaatcatcttgcagcccctcatggacttcatgcgctcgcccgacacacggaatttcaaggaactcatgcgtgactgtctggaaaacttcttccgctcgtgccgtgacgattgcgagtattgcgagagcgaggaatatttcacggacgagagccacaagaataattgggagtaccttatcgacgggacacttttcatagaaacggcatgaagcaggaaatcagacagaacgggaaaaccgtcctttacagcgaggacggttgcagcatccccatgatattcaacaaccttgtcgggaagaacctcaaaggcagggagtattcggactatatcgctttcgtagccattcccgacatgggatttacctacgggaagatagcgtattattcggacgggaatttaatcgcaacgggggaaatcaagccataacattccccctctatgtttcatcgccggaagtccgggacgggtagcgatccgcccggacttctttttttacccgcccgtgggaaaggattgacccattttcggacgcacttctttttctttcggtgagccgtgggcgggaaaagacaaagaagcaaaaagaaccccctcgactcaccggattttttagccaagctccacactcattttttagcaaacctacagggaaaaacggacaagtagcaaggctgaacctgctggttttgcgcacaatctccacaccttcgggtcgtattccacgcaaaagccttgcatgaagtccgttctttccccgtgccccaaagcaaaaaataaatgtttcacttttaattttttgcattatgaatacactgtctttccctcaaatcaccgtaagttacaaggacgctgacgcatccaagagagttagaatccactcttccaaggagtcttacgacatcctcaagactttctacgaggactgtatgcagcaccacgaggagtgctgggcgatgtacctgaacggcgcaggcagactgctgggcgtttcgtgcgtctcacgcagcggcatgaacagtacggtggtggacatacgcatcgtcctccagacggctctcgtctctcatgcctcgggaatcatcctctcgcacaaccacccttccggctcgaccgtggcgagcacgccggacaacaacctgaccagccagttgaagaaaggctgcgaggcaatcggcatacagcttttagaccacatcatactgaccgaggacgcctaccttagctacatggacgaggggatgctttaagcgtccctttttttgttcgctatccgtttcgcacttcttttctttcgtgagcggggcgggaaaagaacaagaagcaaaagaaaccggaaggcggcagggcggatatggaaagcatcctgaatgatgctttccatttcgtccggctcacgctacatcttcaatccccgttttcgctcctgccggatgtcggagaaggagaagcctcccgtctccttgtcgaacttcaccgacttgtccttctgcacgccgcccggcgtttccatccgtttcacattcagcggcttcccgttgtagaagtccgtcatttgccggtagctgaacttttcccccgtcaggctttccatcaggctgttcagcgtgtagatgctgtcttggttatgcacgctctccggcacgaactccgggtgattcttcactatgtccgggtacagcgtcttcgccattaggcagacctccggcgagcgttccgcccacgggatcatcatcagcgactcccgactgtgggcggcgcacctgacatacacatcgggcgtgagcaggcttttcggcactccgccacgcccgacggcggacatccccgacgtttccaccgccacccgcacccgctccggtgtttgcaggtgcacgggcaggatgctgatacacctgccgtccagcggcagcaggaagtccgccatttcgccattcatcacctccgggcggatagccaccgccaccccgtagagttcttccgggttattctcccggcactccttcagcacctccatgcacacctccgcaaaagggatatgctgaaccagcccccggtggaagtcgttcccgaatcccgcttccgtttccagcgccttccggcacagttccggtgtcttcatctcttcgggcacgttctccagctgccagccgtcctcttcaacggcggcacggcacacctccgccgtgcggtcgtgcctgcatatcatctccagaggtacctgatacattctttcttcttgttccatgtttctgtttttttagataggttgtctcatattttcattccgttgcgcctcttgggtgcgtcgttccgttccggctcttgctgttcctgctgcctctgctcctgccgctggctgagaggggcgatgcggaacgtctctttctgccggtcgaaagtacctcacggtctttcaggaaaccatcgggcacctcgatgcacttgaccgccatccgctttcccccgtagaagtccgccatctgcccgcaggtgaatttctcgcccgtcatctgctccatcaggcggcacagcgagtacacgttgtaatagctgtccaccggttgcggcacgacatggggatgggcatggatcatcccgggatagttcaggtacgccgtcaggcacgcttccagcgaccgttccctccacggaatcatcacgaatgacatccagttatgttcggcgcatttccgccacagctccggcgtttgcaggtggacgagcagcagggacaggcacctgccgtcctccgccaccagaaaatccgccatcttcccgtcgaacacctccggtcggattgccgaagccacctcgtaaagatcggctctgccctcgccgtaccagtcccgtatggcttccatgcagacctctgcgaacgggatatggtgcagcaatgccagatgcccgtaaccgagttccgcactcgcttccagcgcacggcggcacatctccggggttttcatgtcctccagcacatgttccagcgaccatccgaactccctgacggtatcggcgtaccgctctgcggtgcactcgtgccggcacaggtctttcaattccgccaaagccggcacctcactctttcccagttccacttccatccccgtcctccttgtcgttgtccgcattgaagtcgtattccagctcgaccgcctgaccgtccgagtcctccacccagacggtgaagctgctctgctcgtccgacagccgggtgtaatagagccggaacgtctctttctccagcgggtagcggtcattgggcagcagcaccgtgccgtcatccagtttgagcgtgccttccccgtcgaagaggaaccagcggatcgtgtaccgggcgtcctcccagcgtccttcccgtttcagctcgcaccgtatctccgccgtctcgttcactttcagctccttcgggacgggcatcgtctccaccgtgaacaggtatttcgtctgaatatccagcccgtcattacaggctgcgaccagcacgagggcggccacgatgtagcagcccgtgaatattctataaatcattgtcctcatatacaattatattatatagcagttatcgaatcatgaagcggattcccacgccgacctgcgtgtggaatttcccgcagtcgccgccgaacagcacccgttggcgaccgtttaccagcaagacaatcttgtccgtcacgtaggcggacagctccagcgtgagcgcacccccgtagatgaaattgtcctcatccgtgagccgggagccgtccggcagcaggctctcgccccagttcaccgtctcgtacccggcaagggcggacagtcccagtgcggcgaagaacgtcttcttccggtcggaaaggaagttcaggtaatagccgccctcgcccgtgaactggctcgccggatagaggcagtcccggtagccgtaccgcttctccaagtattccacaccgaccacccaatggtgggcgttcttcgtgtaggtgctcaccgctatcccggcgtggtagccgaagccgtcgccgtttttccagcgcatgttgtccgacagcccgcccgtgagctgtatgcccctcattccgggcaggcaccgttgggcgtgtgcccggttcacatgcaggcacaccccgaaaagcaggataatgaacagtaaccttttcatcgcttacttgattttcagttcgttaatctgttttgccgccacgaggtcggcgttctccacccggatggtctggtgcctaccgccgtccttctcgaacagttcgatgaccagcagcttgtcgtccggtatggtgaactgcgggacggcatacaccgtgcgcacgtcgcttttcccctccgtcaccagcacctcgttgtagctgcgcaccgggtcgatcacccgttcctgaatggcggtgcgcttcggcactttcttgtccacgaccttgaaccggataaagtccgtccggaaagccacgttcgacctgttcctcgtttccgtgtggaaatagaacagcccgttgtgcgagtggacggatttcaggaggaactgcaccccgaagcgtttgcagcccaagtgccggatctcccgcctgtcctccttgtagatgctctgcatgatcagcttcaccaagagcgggctttcgcctgccagttcccggaaatggaggttcatgcgggtatgcgaaaagtccgtcgtgttcccgttctccaaaaaatccttcatctcgatgttcagcatctccggctcatgcgcataccgggcattgaacgaatagaaacttccgtcctcgcagataacggaaaagttcgtttcccccggaaacccctcggtggtcgccttcacccggatcacgttctccgcaccgtccgctttcccggcgataatccaattgcttcccaagtccacgtaccgcaccgccgaggggaagatgatatgcgtaggctcggcactcaatgccttgccgtctttcgacggtaggttttcaagagcctgcccccgaaccgtgcttacatgtctccatgtacacggctctccattggattcactcaacttagtgttcattggtctgaattttataattacaagattcgcaaacggctaatgtcttacggttttgttttatcaattttgcattccatggcgtatctcctttaagttggcgaagattacgcacatgatgcatagtgatattaccgtttgacccacatagctcacaaacaccttcttttagcctttccataaggctaggtttcggaatgtgccatgtgttgggaataatatctacaagactattcctgtaagcagtttttcttttgaagcctccatcatagaatattctgtatttggttgcacctttggcatctttaaagggcacaataaacttcttatcacgcagaaatttaagtttagcttgtaccattgtcagatttagcttctgggcaatcgttttatacatactgtattccattatgtatccgaatgagttcccaatgtcggagatattattggcaatggcataatagttatagaatcctcttatttcggtactatattgagctactatgtcttcaaccttctttccaatcataaaggcacgtggtttgggtttccaaaccgtctttttccgttcttgggacatccttaaagcatcatattccaaaagcttgttttttgctgtatccatgtttacatgcagcatgactgaaccttttccgaagcgtcttatcacaccttttctatccttatgcctaaagctacagtcacggacaaatatttcgtaccctaagaatttagctttatcgtgtgcgtttgttatcagggtcttttcctctgaaagttccaatcttagcttttctgccatgaatttggcaatgtccgccttgattgtaatgcactcggttttacttccgataattccaattaagaaatcatcagcgtatctaacgtactggattcgtctgtattctgtatccattggttcttgacaggttgtagcgaaggtttgtgccaacgtttcttttatctctgctatcattttatccctcacggattcatccgttattgatttcagcctctttgcaagtcttgttttcttgttattgagtctacggtattccaaacttattcgtcttctttcacctttattgaatttttcagcatattccttgatgtatttgtcgaatctgtcaagatagatattagccagtatgggactgataataccaccttgaggtgttccactatacgtgttttggaatcgccatcgttcaatatatccagctttcagaaattttctaattaagcgcaagaaacgctcgtcgcttatacgctcttttagagtatccacaagaatgtcgtggttgatgttgtcgaagaatccttttatatctccttcgataaaccacttaacgcctgtgaacttttcttgaacttgtgtgagagcggtatggcagctccgatgtggacgaaagccatgtgaggtatattcaaagtgttcctcatatatggcttccagtatcattcggataacttcctgtactaatttatcctcaaaagaaggaatacccaaaggtctttcttttccattcttttttggaatgtacactcttcttgctggtttaggctgataagcctctgttttgagactctcaataagtttttctattcgttgaatgctcatttggtcgacagtttttccatctgtaccgggtgtcatattaccttgtttggcatatatgcgttggtacgcgacagagaacatatcttcattgaatagaatccgatacagccgttcatacttataacttgaaacagaactatgtttcactaaattgtttaatattgtctctggatttctcatgtctctcacattatcttttgattatattaaagtaatccaactgttcccctttgccatgtacaaggctttcccttgctcagactactatgggaactccgttgccatgtcagatattcaggagctattctccatagccttgcggcgttctgatttaggcaatccccatttagataagtaataactatttgcttgacaaattgtcggatgcgatttccgtccattaatccgcttattgcggttgtttcgtagttagttcttttgctctgaacgtaacggtactccgtcagagaactacgacatgacgtttgtagttgccttccgtcattgctcgctaaggtgcaacaggactgtcgtttaaccaattcgggcttcatccttatatttgtctttccaccttgccattcagtcgcagcttggcaactggctgacttatgacttttccgacatgctatgctcccttttgggtttcccctccggataagtcggatggtggtaggtctcatttgaactctaacctaatctcttgcaaaggagatatttattactcacccttatgggcgcacaccgtcttggcgaacgtcacctgcaccccgtggggcgtaaccatctgccggtagggtagcttccgtgtaatcccctgatacaggtcgttgcccgtaacccgctgtatcgtatcattcacttgtgcgttcgcacccgtcaccatgcccataagcagggcgacccatccaaaaatctttttcatttgtcctttctttttaatggttttataatctgtcgatctattgttgtttggcgtaaagcatcagctcataccccgctttcaggtgcacctttaccgtgcggaacttcttggcaaggtactggctgccgccctgcatcagcccacgggtgatgtccatcgccacctgctgtccggcgctccgtgcgaacgagatgctcgttcccaacccgccgccgatgttcgccatcgcctcctttgccgcttcctgttccagtgatgaagggacagacaagcctttctgcccgtcactgtcatacaccgccagctccacgggcagcaagttcccccggtattcgatggacgacaccacaatatccagccgttctccctgtacctttcccgtacccgcaacgagcgtgttctgcggaatcacaaggtttcccgcttgcagcggttcgagcagcctgagcttcaccgtctgtccgtccataatcgtctgatctccgtggatgcacgcccgtatcgtgttcttccccatagtgtacccgctgcctaccgccgtgttgaagccgtagttcctcggctggctgtaccgccgcatgaactccgcatcgctcaggggctgttgcagccccgataccgtccgctcccgtgccacctgcaccgccacggcgggctgtcttggactgttgtcgttctgcacggctgcgccgtccttcccgttctgtcccatgtacttggcggcaagctcgtagctcttctccatcagcgccacctgatcatcgattccgcccgcctgccgttccctttcttccagcttggcggtcaactcctccacctgccttttcagctcctccttttccccgtccaccttcggttcctcgtagaacgagccgagctgacggttgatgtcccggtaggcggtaacggaagaacggctgccgccgccattgtccgaatagtccctgaacggttcccgttccggctcgctgtccggcagttccatttccaccccgtccatatcgctctcttcggagaaggcgaagtcctccagcgagcgcaccttctccgcctgctgtttctccgcctgcgcctgctcgtaggctttccgcttgtcgccgatgatcccgtcattctccggcagggggatgtcggcgttgaacgcccccacggtgtcccggttcacgtcccgctcctccgaaggtgcgaatatcagccacatcgagccgaggaacagcaagcccatcagcggatataccatcagcttcttccgttgctgcaactgtttcggcgtgagcggcttggctgtcttcttctcctttttcccgccgcccttgtcctccttctttccgttccccgtctccggggctgcggcatccgccaccgtcacgtgctgcgttgccgttgctttttcttggttctgttcttccatcatgtcaaaaatttatggttgtcctacattctgattctcctccccggaggcttccttctgcctgtctccccggtttgccgcttgccaggcggttccttccgttcccgtttgagcgatgccgtgggacttgcccggttgtccgcccgcaggtgcgcagccttccgttcccggcggagcagccactcactcaacttctccaccagtcccataccgtccgctttcaaaagggttgataatactgtcattgggtaattgcaggcgcctaatatgctctatccccagttccttcccgtcgttcctgccgatgcggtagatggaggagacggtcatatagaccgacagtgagccgaacgccaccagcgtcacgaggatgattgccacacgcatgtcgggcgagatacgcccggcgaggcggcggagcttcccgtccgcccaatcctgcgcctttgtgatgaatttccttatcatagccgtcagcgtttgagggtctgcaaatccttgttctccgtgatctcgaacccctcgatgatgaagccctgcgggttgttgtcgctcctgaccgcatccagcaggcggcagcgggtcacaaggctgcgctccgtaacagagctttcccgcaggatgatctgccgggcgaacgtccgcacgctgtacgggtacttgtcgaagtcgcaccgcaggctgtctatctctatcatctggttgatgttccccgagattatccggttgtaataccccttttccgagaggtccttgtagtagttgaaggcgctcttgtccgccagcagcagcgagcgtttgatattgccctcgatagccgacttgtcgggcgagagcgtgaagaacagctcgtggaagcggcgcacgtgctcccgtgcctccaccgggcggttctgccgcacgtcctgcgagagcgccagcatcaggctcttgccgttgtccagcacgtagatcttctgccgctgcgcctcggcgaagctgtacgacttccacagggcgaagcccgtcaccacggcgcacaggcaggcgaataccagcgtgaagagccgtatctgcctgaagctcgtttcgatatttttcaaactcttaaattccatgtttccggttttttattcgttatgactcattttcttggggcatccgccgctacttgatgatttttccggcgatgttccccacggcggcacccgcacccgctgcggcgacgttgccgaccttgtttgcggtttggttcatcgcacggttggcttggctcaccccgcccgccatgatgatccagttggcgaccgtcgggatggtgaagtacccgaatatcccgatgattaaaaagatgatgtacaccgtgttcgagctgtccgggatgaaggtcgggtcgctcatcgcctcgatgtcacgggtgagcatcagcacttggatgcgtgccagcaccgagctgaacaggtcgctcacgggcagccacatgtagatggagatgtacctcgttatccactgcgtgagcgtgctctggaacccgtcatagaccgagagggcgaacgctatcggaccaaggatggaaagggcgatcaggaagaacgtccgtatcgtgtcgatcaccagcgcagccgactggaacagcagttcgagcagttcttggaaccacagccggatgttccgcttcatgttgtattccgtccggtcgatgtacatcaccgccatcgtcttcaagtccttgggcgaccagcccagctcgtcgagcttcttgtcgaagtcctccttgctcgccagatatgccttctccgggtcacggcggaacgcctccctctccagcgtctccttctgctcccggtatcggttcatgtcgaaggtctgtgattcgagcatcccgtggcagcccttcaccacgggcgagagcaccgtgttgatcgtgccgatgacgaaggtggggaagaagaggatgcacagcccgatggcgaacgggcggagcagcgggtacacgtcgatgggttcggcacgggcgagcgcctgccacaccttggcggctacgtagaacagcgcacccagcccggcaattcccttggctacccccgtcagcttctcgcagagcggcatcatgtcctgatacaatacctgcaatatctcatgcaggttcgtgaagtctatcgctaacaacatagtcctatattatatttatgtacgtgaacattattatatattgccactctcaccagtaacggtcttccgcatccccgtagagagccaccacccggtcggcgtcctttttcttcttcgcccgcaggtagctcaccgagatgttcttgtccgtataatactgcacgaggttgcggtactccagcagccgcttgtagctctggtcgatgatagccagccgttcggcatccgagagcgacatccccgtcacgttcaccacgttcttcagatcttgcaggatgtccgcactctcgctcaacagcttggcgtacccgaacgagatggtttccagctcgtccggcgtgtagttcgggtcgcccagcatcttctggtagttgcgcacgtagatttccgagatgtccgccaccagcccgatggacttcttcaccttcactccgcctttcaccacgtcatgcaccgcctttagcgcattgtaatacttccgcccctgctcgaatatcttcgccgtttccctgaagccgtccagcgtgtgctgtgcggtggcggaggtctccacgatctccttagctgtgttgatgatgccctgcgccagattgccggggtcgtgtacgacccattgggcgttggccgcacctgccgtcaggcacgccacgcccagaatgattgcctttattgttctcatgtccttactgttttagggttccgtcactctttctcctgtactctccgcccggcgacagccggatgtggtctttctcccggtcatagtccatcatcacggcgaagcccgtctcgatgaacagcaccccttccgtttcccggacgaggtaggtctccgcttcactgtcgcccttgtggtttctgtgcatgaccgttacacggtacttgccgtcctcttcccagagggtgaagggcggcttgccgcccgtgctgacccactcgccgcacatcttttccaaccgttccgcatttgtctccttgcaggaaatgacaaacgccagcgccaccgtcaccgccgacagcagcaggattaaattcaatcgtctcatcttgattccgttttttttaagttttacaaaattttattctctccattccgtttagccgtttgtacatccagccgttcagccagccagccgtttaactgtttaaccgtttgaccgtttagccgtttggttaatcgtccgaccctttagccgttcgtccggtcaatcaaccacccgtccggcagcctgtccgccgctcccagttagcacatcggtacattatttatacttcgtctccgccagtcgcttgatggcaagctccaaatccccgcccagctcttccgccagtgcgaacacctccgtcttctcgctctcttcggtggtataggtcaagtactcggcagccgatacctccgtggcatacaccgccgactgcaccccgttcagaccgatccacacctccttgtacttccgtccgggatggttggcgaggttgatggagagtatctgcgacttctccttgtccgtcagaccgagcatcgactggatgccgtcgaacttgttcatgtacttcttctggtcgagcaggattttgcagtccgagttggtgatgatagcctccttcacgatgggggacgagatgatgtcgtccacctcctgcgtgacgacaatcgcctcgccgaaatatttcctgacggtcttgtacatgtatttcaaatactcactcatactcggcgaggaaagggctttccaagcctcctcgcagatcagcatcttccgcacccctttcaggcggcgcagcttgttgatgaaggcttccatgatgatgatcgtaaccacggggaacagctcggcattatcttttatactgtcaatttcaaatacgataaaccgcttgtgcagcaggtcgatgttctcgttcgagttcagcaggaagtcatagcgtccgcccttgtaatactgcctgagtgtggtcaggaagttgtcgatgttgaagtccttccggctcaccttgatgtcccttgcagccagctccttccggtaatcgttcagcatgtactcgtagaaggtgtcgaacgaggggacgatgtcccggttctgctgtatccggcggatgtacgccgacaccgcactgcccagctcgccgctctccgtcttcgtgattttctcgtcctcgcccttccacagcgccagcagcaacgtcttgatgctgtccttcttctccacgctgaacttgtagtcgtccgtgaagaaggggttgaagctgatgggcttctcctccgtgtacgtgtagtaaatcccgtcctcgcccttggtcttgcggtgtatcagctcgcacagcccttggtacgagttgcccgtgtcgatcagcacgatgtggctgttctgctcgtaatactggcgcacgaggtggttcatgaagaacgacttgccgcttccgctcggaccgaggacaaacttgttgcggttcgagatcacccctttcttcatcggcaggtcgctgatgtccagatgcagcggtctgcccgtcatcctgtccgccatcttgatgccgaagggtgagagcgagtccttgtagttcgtctcttcggtgaagaagcacagggcttgcgggatgaacgtgtagaagctctcctcgaaggggaagtccccctcgttgcccggtatcgccgcccaaaagagcgtgggcacgtccaccgtgttgtgcctcggcttgcactccatcagggcgagctggctgcccacctcgttcttgatgcgcctgagttcctccctgtcgtcgctccatgccatcacgttgcagtggcagcgcaccgaggtcagccctttcgagtgcgcctcgttcaggtattcctcgatccaagccttgttgatctggttggagcgggagtagcgggagagcgagtgcatgttccgggcggtctgctcgaagcgtttcaggttctccccgtggtcgtcgatgaagatgtactggttgtagcagtggttgcagtccagcagcaagcccaccggggcggcgaacgacagccggcagtccgagcggtcggtcgagagccgctcgtaacggctgtccgtcgccaccttgcccggcaggtcttccgtgtccgagagggtgtgcaggcagaggatgtcgtcgccgatgcgcatctcctccgggttcaactggatgtccttcagcaccgtcgtgtcgtgctgcgagagcgagaggtacttctccacgatgcccgccgccgcttccgtcccagtgatctcgtccgtcgtgaggcggcgcagcgtaacaaaaccgctgtcgttcatgatcttctcgaactgcccgacggcttcgaggaacctcgtaaccgtctcccggtcctctatctccttggggacaagcctgcccttgcagagggtggagaacgtgctttcctgacggctccgcaccttcgtggtctttgtcaggaacaggtagcaggtgtgcgagaggaacgggcgttcgttgaagtgcctctcaaagctccggctcaggaagctcaggtcgtccctgtccgtttccggccggtacttctcctcgatgaagaagtcctgcttgtgtacgatggaatactccggcagcaccttcaccgccttgtgccaagccgagtggatcgcctcgtactcgctccctgtaacggagaacagttccggaagttccaccctgaaggcgaccgtcacgtccgcctccttgctcacgacgcagccgttctccaccgccagcagcgggaacttgctttcgagcgtcgccgctttcattacgtttttcattcttgccagtgtttaaaaataaataatcgggggattttcagccggttcaccacgtatctcggatgcctcctgcgggcggctgccttcatcagcccgtgcgtgccgtaccgggcgttcagccggaaggtcagccataccagcagcgtagccgcagccacgccgaagccgatgcatacccactggttcacgcccgccatgtacaggatgacgaacaccacgaaaacggcgagcagaccgccgcagaagatgaagaggtactggctttccagccccttgaactccacgttcctgccgatccccttgttgatttccatgtccatagtcgctgttttacaggaagaacgaacgcaggatagtggcagctactatcaagaagatgcaggctccgaaccagctcgccgccgtcttcgacgtgtcggggtcgccggagctgaacttcccatatactttcacccctccgatcaagccgaccaccgcaccgatggcgtaaatcagtttcgtccccggttcaaaatacgaggtgaccatctgcgtggcttcggtgatacccgcctgcccgtttccctgcgccattgcgcccacggcagcgagtatgcaggccgccgtgaataagattctcttttgtctcatttgtctttaaaattttaattaaacattatggttgtccatcagccgggcgacacgcttacgtgcgccctcgaactcgtccagcatcgcctcccagatgtccgatcccatcacggacggcagcacctcacgggcttcccgctccgccttttcgtccgcattgtccgacaccagtacccggcgcacctttttcaggtcatcgaaggagtaccccgtggcgaagtcagggttgccgtccgggtaataagcccctaattcctcttcctcctccagttcccggatctcctccggcgtgggttcatagtccgtttcctcctcgtcctcctccggctcgatgtcggagtagtccgccccgtcgtcctccgctgcgagttcgtccacggctccggctaccgcttcctccccgtcctccgctccgaagggcaggtaggtgctttctcccatgaccgtgtacggctcacccggttgccccggttcctttcccgttccgtccgtgtcttcgtccgtctccgctgtcccgaatatcccggcgatgtcctgccggtagtatttccacagcacggcgaggtaatagagcagcaggacggtgagcgataatttcagtatcatgccgtttcctccttcctttttaaaagaggttctccagtttcccggcgtatgccgcctcgatctcctcccggtattgctcgaagtgctgtgccagcacgttgtcgatgtatgccgagagcgacaccttgccgcccgtcagcatcaccgaaattttggcgatgcgctcgtggtactcacggcgcacatagaccggcttgccgtaacgggcggggatgtccatgcctttaaagaaggtcgtctcgtagtccgcctgccttcccttgcgccgtcttgtgtccgccgccttcccttcctgcgccttttccaccggcacggcagtttccccctttccggttcccggttctcccgttcccgccgcctcgcccgccatcatccgcatcagcagctcctcgtcgatgggcttctcattccgctgcttcttcatagccttccagtttgaggatggttgctatctcacgggtcagttcggggatgccgctgcctgccagcatccgcctgtcgggagccagcagcgtggagcggaacaccgtccgtcccgtactgtccgcctccttgcggaagcgtttcgtgtcggggatgcgggtttgcagcatcggcagcctcatgtcggcgactacctgcccgtacttctcgtacagcccgctcgtttcccgcttatcgacttggttccagaaaaggtaaagccccttcaggcggctcgtctctttgcccagcatcatccgttgcagcacgtcgaggaaggagagcgtgctctccaataccgccttgtccgcactcaccggggcgaagatgtagtccatctgtgcgatcgtgcgcaggatgcccgccgagttcaccgtgcccggcaggtcgaagaagagcaggtcgtagcagccttccgccgccagctcccttgccgtgtcgggggcttgctccacccggcacttgcgcaccggataggcggcacgccccggctgccgcatctgttcgtaagccgcccgtttcaggtattcgttctccagtaccgcccggctgtcccgttcccgcatctcgtacaggctgtactgcgggaagtcgcagtcgatcaccgccagcggacaccccaagcggtagtgcaggtagcccgccaccaacaccgtgatagccgtcttgccgctgccgcctttctgtgtggcgaaagccacgttcaatgtctgtctgtccatatcgtcattctgttggttattcatccggccgcccgtgcagccgcttctctgttcactcaatcagtcagcttttcagccactctgccgttcattcattcgtccgttcattcgttcaggcatccggtcatacattcagcccggcatccggctgtccattcaatcatccggctgtccaaccgtttgaccgtttagccgtttagttatttagccgtttggttgtttagccaatcgtccggctggttatccggttgtccgtccttttgtccagcaagaccgtcagccgttcggctgtccgtccggtcggctatccggttgtttccttgtctatccggacagtcgtttcaccgcttccacggcgcaaaggaatatcaaaataccggtagtttatccgtttgattatcagtgtgtcgtgcattgtctttccacccgtaggtttgtcgcatccgggcatggtgtccggacgggaaaagggctgttactttgcaggcggaaaccaaaatagagtaagaatgaaaaagagcggcaaccgcccgagggagtgccccggcactccgcagcaggcaagggcatcctcaatctgtccggcaggacggattttattttcaaacgaaaatggcaagttgtgtgctgcggcactcgaaatgaatttcgtgcctcaccaccaccttgccccctcgatgtggcattcccctccggagtcgggggatgctcacgggggagagccgtaggcatacggcgttttcagaccatgtttcacttaaaattttacaggatgatggacaatcagaagaagtatgcgggcaaccacgggcgaaaacccaagcccgacaagatgcgccaccgctacgtattccgtctggatgacggggacaacgcccgtttcctcgcgcttttcgacgagtcgggcaaggcgaccaaggcggagtttatcgtttccgcacttttcggcaaggagattaaggttattaaactggataaggggacgcaggatttctacatgcgcctgaccactttccactcgcagttccgtgccataggcacgaactacaaccaatgcgtgcgtgcgctcaaatccaatttctcggagaagaaagccctcgctttcctctacaagctggagcggcacaccctcgaactggtcgagttaagcaagcggatttccgcactggtggaggagttccagagcaaataccccgtccgatgatagccaagatctcgcacggcagcagcctgtacggggtgcttgcctacaaccagttgaaggtggacgaacggcacgccgacgtgcttttcaccagccggattatcgagccgcagggcgataacccctacacgatagggcatctttcccgctcgttcggtgactacctcacagccaaccgcaagaccgagaagcccgtcctgcacatctccctcaatcccgacccgaaggattgcttgagtgaagagcggtttgtcagcttggcggaggagtatatgcggcgcatgggcttcggcgaccagccctatatagtctatcgccacaacgacatcgggcgggagcacctgcacatcgtttccgtccgggtggacgaaaccgggcgggcgatttccgacagctacgaacacgggagttcgatgaaggtctgccgggagctggaacggcagttcggtcttgtcccggctacgcccaagcagtggaaggagggactacccttgtcgcccgtcggttacggggacggcaatctcaagggacagttggcaggagtcatccgcccgctcgcccgggagtggcgtttccgtacattgggcgaataccgtgccgtgctttccctttacggcatcacggtggacgaggtaaagggggaatacggcgggcgggagtatcacggcttgacctattcggcaactgacagggagggcaacaaggtcggcaagcccttcaagtcctccgtgttcggcaaggaggcgggcatcgctgccctcgaaaggcggatgcacaacgctgccgcatgggaaaagacccacaaggaggtcgccgccgccaccgccggaaaggttgcagccgccatgcagaccgcagggcatgaccgggcgcagttcgagcgggaactcatgcggcagggaatcggcgtggtattccgtcagaatgaagccgggcgcatctatggggcgaccttcatcgaccatgccgccaaagccgtcttcaacggctcccgtctgggcaaggagttttccgcaggcgtgttcaacgaccttttcgccgggcaggaaggcattcacctgccgcaaccctccgccggagtggaacatcccacccggcagcaggagcatacgggcgcatcccaatgggacggacataccggctatcgtcctgaccacaaggacggcactacccaaaacgtggcggcctccttcaacctctttgccctcgtacccggcggagcgtccggtgaccagcccgtaccgccgcagcgcaaaaagaaaaagaggcgcaagtacggcaggcaacaataatcaacttaaaattcaacgaattatgcaaaacgaagacgatttgcgtggactcgccaaagtcatggagttcatgcgtgcgataagcattttatttgtagtcatcaatatttattggttctgttaccagtccgtccgggaatggggcatcgacatcggcgtggtcgataggatattgctcggcttccagcgtaccgccgggctgttctccaatatcctctggacgaagctcttcgccgtgctgttcctcgcccttagctgcctcggcacaaagggcgtgaaggagcagaaaatcacgtggcgcaggatcatcctttgcggcgtgtccggcttgctgctctttttcggcaactggtggctgctcgcccttcctctgtcgcttccggcagacaccgtgctgtatatcgccacccttaccgtcgggtatatctgcctgctcatggcagggctgtggatgtcacgcctgctgaagaccgacctgctcgaagacgtgttcaacgtcgagaacgaatccttcatgcaggaaaccaaactgaaggagaacgagtattctgtcaatctccgcacccgcttccggttcaggggaagggcgtatgacggatggattaaccttgtcaatcccttccgtgcgacgatggtcttgggtacgcccggttcgggcaagtcctatgcgataatcaaccagtacatcaaacagatcatcgagaagggctattcgctcttcctgtatgatttcaagtaccccgacctcgccgagatagcctacaaccacctactcgcccacttggacggctacaaggtcaagcccaagttctacgtgataaacttcgacaatccgagggaaagccaccgctgcaaccccatccatcccgacttcatgaccgacatcagcgatgcctacgagagtgcctacacgataatgttaaatttgaaccgcacatggatttccaagcagggcgatttcttcgtggaatcgcctatcattctgttagccagtattatatggtatctcaaaatctacaagaacggcaagtattgcaccttcccccatgccatcgagttcctgaaccgcaagtatgccgacattttccccatcctgacctcgtacccggagcttgagaactacctttctcccttcatggacgcatgggaaagctcggcggtggagcagttgcaggggcagattgccagtgccaagataccgctttcccgcatgatctccccggctctctactgggtgatgacggcggacgatttcaccctcgacatcaacaatcccgaagagccgaaagtgctggtagtcggcaacaatcccgaccgtcagggcatctacggggcggctttgggattgtacaactcccgcattgtcaagctcatcaataagaagaaacgtctcaaatcctccgtgattatcgacgagctgcccaccatttacatacgtgggctggataacctcattgccaccgctcgaagcaacaaggtagccgtcatgctcggctttcaggatttctctcagttgaagcgtgactacggtgacaaggaaagcgccgtaatctgtaacacggtcggcaatgtatttgcaggtcaggtagttgcggaaaccgccaagacgctctccgaacgcttcggaaaggtcctgcagaaacggcagaacatgaccatcaaccggaacgagacttccgtctccatcaacacccagatggacagccttattccggcaagcaagatttccaacctcacgcagggcatgttcgtgggggcggtagccgacaacttcgacgagcgcatcgagcagaagattttccatgccgagattgtagtggataacgagaaggtcaggcgggagaccgcccgctacgtgaagataccgcagatcatcgacttcaccgacaaggatggcaacgacaccatgcagcagcagattgatgccaactactaccgcatcaagagcgaggttaagcagattgtcgctgacgagatcgagcgcatcaaggcggatccgaaactctcacacctgatcaaaaacggataataagcgtaaatttctaccttagtagtaaaacagttgtttttatatagttttaccaagttggttgaacagcgcaaattgttgaataatagcgaatttaagcaatttttcgccaagagcgcaaaccgaaaattacgcagccatggaaaatagcagggaaaaggataactgaccaaggagcaacttgatataatgtggcaggctgtctgcatctgtctaggaaagacaccgcaggcggtcaggacgtgctggaaatgcataaaacactccaggcgaacaaagtcctgttcaggatgacggatgaaagaacaagggtgcagcaacggacgagtacctgcaacagttgagccgacagatagaccggttggaagggttgaaagtaaaccacagccatagtttcaacgtgacatattccaggtcgtatcttgttcaagtcaccatcgtggaattgtttcttttttcgctggtgcataacgcatggcagcttaaaaggggctggcggctcaaataccgctacgttctgatgtcgggaaatgcggacgccaagacacttgacaggctggagaactgcttcgagtggaacagggacaggaagctaatatggaagatcaggaaagaggtggaggacttcgagcgttggacggaaaagaaagtggcagaaatgctgcgtgctaaaagacaacagccgggagtggggaaataacatacaagaaagaaaaaggtccaaaatataccgtacttcctgatttttaaacgcttcaagttattgattacaagaacggattgtctgaagacgaaattgttagatgatcaaagtgaccataacaaccgtatggtatttcttgttatagtcggttgcatctgattatgcaggaattttaatgtacatattcaaatataaatattgatataggccaaaaatacggtttatttattaataaaatcatgattactgaacaaattgttaaaaaatagagctaaattgataagttaaaaatcaaaacattcatcttattttgcaaaaaatatattattaatattaataactataacaagtatggttaatttttactgctcgtttttccgtaaatcaaggaattattttaggtattgattatattgatttattcctcattttatatatttaaaattaaacaattacatgaatttattcaaatcatcagttctgtgcggcatggtcatagtgtcattcatgacatcctgtacagacgtggatatcaccatgcccaaggggcccaaaggtgatacggggctttcagcctacgagttttggaaggaaaaagttgcggatggaaccgtcaactggccgaaggatcagacagaagtcgctgacttcttcaagtttctcaagggaaaagatggcaaagacgggaaggatggtcagagtgctttcgagcagtggaaagacatgattgccagcggtagcgtggacgacccgcataatcccggcgagaaatggccctccgaaaacaacacggtacaggatttctggcgtttcctgaccggagccagcggagaggacggacagacaccgcatataggtgataacggcaactggttcattgggaaagaggataccggtatcggcgcacgtgggcgtgacggtcaggatggtaaagacggtaaagacggaacgaatggtcgtgatgctataccgccgacagtcaccattggcgataacggcaactggtatattaacggaacggatacaggcaagcctgctttcggtaaggatggcaaagatggaaaggacggaaaggatgccgtgcctcctacggtcaccatcggcgataacggcaactggtttgtggacggaacggataccgggaaaaaggccgttgggcaggacgggaaatctcccgaggttgccattggcgataacggcaactggtatataaatggaacggatacaggcaagcccgctttcggtaaggatggcaaagatggaaaggacggaaaggatggagctaacggagccaacggtaaaagtgcctacgagctttggaaagagtatatctcgtccggtgatgtggacaacccgcataatcctgaccaaaaatggccggcggaccggaacaagcagactgatttctgggatttcctgaccggaaaatcctctgttatcgagatagaagttggaaaatacaatgttattcctgaatactggaactcttccctgaaagagtatgttgtaccttcggacggttcggttctatttaccgtgtatgacaagaccggcaaaaaggtcacagccggagtaaaggtgagcgacttacccggtgtatcttctacggatgcatttatcacaaacgaggaagggcagttcaaggtcacatgggataaattgccagacaataagggtttatcagaaaggaaaggaagtgtgactgtaacggttgatggaacgcaggaaacgagtgcgggcaacacgttggtgccgaataggatcaatgttagagctatcattacaagcgcatatctgtctaattattctaatacgtcgatagatatttataggacactaaatgtatattacagcttcgagcgtcaagtggatggagaatgggataagtatccgacgttcattactactccttataatagtatgaaatcggccagggttaaagatataaaccggcctgtcaacgaaggaaatgtggacaaagatcagttagtccgctatagcaatggaaactcatatctctacatcattcgtccgttggttttgacagagacggagaaggcaaatgtggcgaagaatgatactgtcggcaagttggcgaaatatgaatgggaccaaacagacaattatgcggcactgtattttggtgatggtacgggaagttataatgactatggacagactgtatatttgcaggacaagatacatgtcccggaagtgtatccggccccatcttttaaagaaaacagtgtgtttattgaaatcaagcagggtattaccaccatgtggggagagattgacacggataatttacaggatttttataaaacattcgcttacccgacaaggcaagataaatttacaaaagaggaaggaaccaatgtttggaaacatccggaaggcaagttgccggcatcagagctggaagaatatcgggctgtatttatagaaatgcgtactttcatcaatggaacgggaggaactgtacataccggatccaagccgttgtcaacgggaggcaagcgctttaaactgacaagcacttatcccaataactggattggtctggatatcagacgacggacagaaagcactgataaaataacatataatatatctaacgagtaccgtgggcgttacgcttactatctgttaaaagaggaagataagtactatttagttgattttgcggactggtccaagcggatgcccttgccaatcaaggattgtcctgtcgactggatgaattgatttatttattggataattgaatatgaagaaaaaaataacgatatgctttgtgtgtctctccttgctgttggtctctctggcggtgagaggacaggacacgaaaacgacccgtcgtgtgcctctccaggcagaggtgacgcatgacggactgtcagaaaaggaatcaaaagcctgggagatcggtctcggcggttcgctgataaactggagtcgggtgtcagtcactggtttccggagtacgccggacaactacttttataacctgaaagcgaatcatctgatgggaggggcaaacttgtacatcgcacgggaattgaaccggtggttttacctggatttgcagggaagcgtcggtttgacgaaaaacaacaaccgtaccgcaggtgatgacaggaaacgtgatttactgtacatggggggactggggctacaattccgctttactcccctgctcagatcccaatgggttgaaccttatctcagggtaggtgtgaactatctgcataaagactttgcttccgtatatggcggcaactttgaggatgatccaaccggacaggcatattgggagtcttccgacatctggaatcctgacgggcgttcatccgacaaaaactcgtttgttcccctgtctttcggggcgggtgtgaaagcctggttaagcaactcgttcgggctggggttacaaggtgaataccttctgcccgtgcagaaggggcttccccacttcgttcaggtttctgccagtgtcatctggcgtattggcggaaagagcaaacatgcggctccggtggtacgatatgtggagatagagaaacccgtggaaagaatcgtcgagcgggtggttgagaaaaaggtggaggttccggccattattgacactatggcgtgtgatctcttggagaatatccattttgaatttgacagggatgtcataacagccacttcggaaagaacgcttgacaggctggcagagctactgaaaagctatccggacagccgtttccttatcacgggctacacggacgccaaaggaagcgactcctataacttgaccctttccgcacggcgtgctgaaaaggtgcatgccgccctgatcgggcgtggagttcccgcccggatgattaaatggcgtggcgtgggtaagcgtgcggccattatctccgccactgctgcggacaatatccgtgaaggggacagaaaagtcctgctggaacgggttaccaacatggattattggaatgccctggatagcaaataacccgaatgttcagatagtgatgaaaatggattgaaacagtgcgggaatctcatccgcatcattctattcccaggtcaggaggagtaatacggggcatttctccgccaggcctgggaattttactttacatgactggatggacgtgcaacaggtttagatgattatcgagaatgattaataagcataaaaccgcttatgctatgattgtattgctgcaaaattataaatataattgtccatgtttttgcattgctaataaacagatcgacactgtttttcatggggaagcaggcagaatgatcgctcatgataatacttgtgattcacatgaatggaaaaaacttgtgtctttgtagtttaacaatcaaaatattaaaacttatgaatactcttcttttgaatgccacttcttccaaaagaaaaagaatcacttctgaaggtcatccatacagccagtttctttgcattaaagagctaaaatgacaaaaaaaagagctggaatgaaaacatgtgtttttgaataaatttcgatttttgcaaaataattaaaaattaaaccttatgatgaagaaaatttttatcagtttgtttttgtctggtgtttttatgtatcacacaaatgcccagactgcagtagagggtaacaagtttctggacaactggtccatcgggatcagtgcgggaggaacaaccccgttaacacatcattctttctttggaaacatgcgcccgatcacggggatagaactgaataaacaattgacaccggttttcggtttcggtctggaggcggtcggaagctttaacacctcacaaagcaggaccattttcgaccgctccaatgtcagtctgttggggttggtgaacctgaacaatctccttgggacctataccggggttcccagaccttttgaaatcgaagcggtggccggaatcgggtggttgcattattatatgaaccgggaaacgggttccgatcagaacagcatgtcaacaaaactgggcctgaactttaatttcaacctgggagagagcaaggcatggacattggcactgaaacctgccctggtctatgacatgaatgctatgggttccgaagccgtacgtttccattccggacgggccgtatgggaaatatccgttggtctgaagtatcatttcggatgcagtaacgggaaacaccactttacaaaagtgagagcttacgaccagcaggaggtggatgtcttgaacgcaaaaattaatgaacttcatacacaggccggtaaagatgccaaggcattgcaggaggcagtgcgaaaggtaacggaactggaggccgcactggacaaatgccgcaaccaggaaccaaaaattgtgaaagacaccattgacaacactaaaaagacgctggaatccgtcataactttccgccagggcaggacgacagttgacaactcccaactcccgaatgtcgaacgtatcgctacttatttaaagaaccataagggagcaagtgtactcatcaagggttatgcctctcctgagggaagcgtggaagttaacgagcggatcgcccgacaaagagcggaggccgtgaaaaaaatgctggtgggcaagtatggaattgcagaagaacggattgtagccgagggccagggagtagggaacatgttcgaggagcccgactggaaccgggtaagcatctgtacgatcaacgcgggaacggaatccagtagccgttaaatgcgatccggaaaataccggaaagatgcattcacttgaacagaatgtattaactatatttattctacacgtaatttgaaatgctatgaacaggtatgtatctgaaatgatcgggacaatggtccttgttttgatgggatgcggaagtgctgtttttgccggggatatgcccggtgcggtcaccaccggggtgggtaccctgggagttgccatagccttcgggctgtcggtggtcgccatggcatacgctattggcggaatatccggatgccatataaatccggcgatcacactgggcatgtactgctcgggaggaatggggggcaaggatgccctgttatacattattttccagataatcggggggattctcggatcagccgtacttttcatactggtatctacggggccacatgccggccctaccatgacagggagcaacggctttgttgagggggaaatgttgcaggcctttatcgctgaggccgtctttacgtttattttcgttcttgtggcgctgggagccacggataaaaagaaaggggccggtaaactggcgggcctggtcatcgggctgacgcttgtcctggtgcatatcgtatgtattcccatcaccggaacatcagtaaatcccgcgcgcagcataggacccgcacttttcgagggaggaggcgcgatctcacagctttggctatttatcgtcgctccactgacaggaggtctggccagtgccatagtgtggaaagccatttctcagcatagcgacagacaacgatgaagggaaggtggatgaccccgagacacgtttctctgttatccacctttgtttgatacattattatcaactaaaataaaaaaagatgtcaaaaagtagttttttactggattttaaggcgtttgtcatgcgtggaaacgtagtagacatggccgtgggtgtgattattggcggtgccttcgggaaaataatatcttcagtggtggcagacatcatcatgccaccgatagggttgctggtaggcggaaccaacttctcggaactgagatgggaattggaacccgccagggtagttgatggagtcgaacaggcggccgtcacgataaactatggaaacttcatacagaccatgctggattttgtgatcatcgcttttgccattttcttgttcatccgcctgctctccaatctcaggcgcaaaaaagaagagacacccttgcccccacctgtcccgagcaacgaggaaaagttactttcagaaatacgtgacttgctgaagaaacaatgacgtttattcaaacggtatggacggtatcgggcaggaacatatctgaggaacaggctactccttggcggtggaaattttcctttgtccctgaatgataaaaatagtgtgaacattaaaattcagatatgactaaagcagatattataaaccgggtctctgaggagcttggaatcgatcgcaggaccgttggcctggtaatcgagagtttcatgaaatgcgtgaaggatgcactcggcagagagagaattgtattcctgcgcggattcgggaccttttctttgaagaaaagggcggcaaagaaggcacagaatatccaacagcacacaaccatatgcatcccggctcgcaaggtccctcattttaaaccctcggagtctttcttggttctccggaaagaagataatcgaaaatagaccgggagtgaatctaccccttccattgtcagggaggggtgtattttaatgtgttttatggaaatttatcaatcatgttttactcctgttttccagccccgttcagatatggactacaggatcatagatgaccggacgatcatgtagattcccggtaaacctgtaaatagactgttatgcgtgttttcaatcttttattgttgatctccatgttcattccctttccgctgcccgctcaggtgggcgaacgttatatagaggtaaccggtacttccgagatagaggtagttcctgacaggattcattacgttatcgaaataagggagtacttcgaagaagagtttgatggcgtatccaaaccggaagaatatcggacgaaggttcctcttaccaggatagaggaggaattgaagcaggttttgaaaatagtcggagtgccacgggaggcaatccgcacaaaggatgtgggcgataattggcgtaagccgggacaggattttctggtttccaaatcatttgatgtcacgttacgtgacttcacactgattgatgaaattttaaaacgggtggacacaaaaggaattcatacgatgtatatagataaactggaacatagggatatcctgtcctatcacaggaagggcaagatagaagcactgaaagcggcacgggaaaaggcggtttacctgctggaggcaataggtaagaggccgggtgagatcatccgcatcgtggaaggaggggatgctggaaaagagatgtttgcacaaggtcatatcttatcggttgccccgcccccatttgagagaagccgcacgataaaaaagagatattcgatgctggtccggttcgggatcgtggatcgatgaaccgttattataacaaatcccggaatggacttgcaagagaagataacgggcattcgggtttgcggtgaaatatccggccttttctctgaccggtaaatagattaatagattcaactcacgataagatgaaagattattactttattatgaatgccggggtaaaagccggaggggagatcacccatgcggtattagaagggaaaattgtatccgcaccgaaaggatacgatgccttcacggggattgaagcggccagggagaaactggcttgcgggaatatccgtcagcagatggaagaattcggtatcgaacttgagatcgtgccggtaaatactgattttttactacgatgaaggaatattgcgtttattggtttgaaaacggagaaccgaggcacgaggtattttcctgtctggacggggcggagatgttttcctgcatgataagaggacaggacggcgtggaacacgtggaaatatccgaggaagatatttccgctccggaggaattccgggaaatatgccccggagatttctcttgaacatatgacatggatccggggtccttttttgccgtagcctggcggtaaagggaccttatctggttgtaaaatcgggcagtgtcaaccattttttcaccgattaatcgcatacgcaagatgaaagctccacggaaaatttatacatggaccagtatcctgcttttcgtgtgctgttcccttatttttctttcatgtgaaaaggaagagctcggggaagccatggaaaatcggaaaacgttattcatgtttctgccgtggtccactgacctgacaggctatttttacaccaatatcgcggatatggaggcgtgtgtaagcagaagggggctggagcatgaaagaattctcgtgtttatgtccacgagctctacggaagccacgatgtttgagatcatacattccaaaggaaagtgcgatcgtaaaacgctgaaaaggtatggcacttcggggtttactacggtggagggcataacggggatattgaacgacgtgcaggaatttgctcctgctccggtttacgctatgatcataggttcccatggcatgggatggcttcccgtggacggtacacaggcggattcccttttccggatgaaaaagcattgggagtatcaggagcagccgctgacacgctatttcgggggactgacccgggagttccaaacggacgtgggtaccctggcccgggggattgtaggcgcgggcgtcaaaatggagtatatcctgtttgacgattgctatatgtcatccgtagaggttgcctatgaactgaaagaagccacaagatttcttatagcctctaccagtgaaatgatggcatacggaatgccttacgccactgtgggggagttcctgctgggaaatcctgattacggatccctttgcgaaggattccacgacttttattcaacctatgaaatgatgccctgcgggacactggctgtgacagattgctctgaattagataatatggctgctatcatgaaaagtatcaatgacaggtatgttttcgatgattccctacaaggagaactccagggactggacggatacacccccgtcatcttttatgactttgccgattatgtcctcaccctctgctctgaccctgtcctgacagcccgcttcagggaacagctggagcggcttgttccctataaaacccatacgggtaaattttattccaggaccaaagggccccttcccatacatactttctcgggtataacgatctcggacccgagcaccaatcccatggccttactgaaaggtacgacctcttggtacaaggccacacacgaataaccccgtggaaaacggacagatgaaaatacccgcatatgacgcaaatattcccctttcttcataaaatttccgataagttcggacagcatcgaaaataattctacacgtatgtaccatatataattttgcagtgatatttttatttacagtttattcggggtaaaaaggtcacgagaaaatcaaaacttcaattactctcgaaccggaatgtgacaaatctacgaacaggaggacaaacgaggatacctaagccgtaaattgcacgtttccagcattcatcccatatctttacgtccggtttcaatcggaaccttaaaaatattcaccatttaattttttcagattatggacgaacaaccggacagcagccagcagttaatggacatcctgctcgtcatggacgagaaaggcacgcttcaagccgtcagcggagtaaaggacggcgagttacagaccaagaacccactggaggacaacaacgacctcctgcgggtggatcgccacggcgatatgttttcaaatttcttttccaacctctggagccagttgaaagatccgacccgcttccatttcttccgtgtgccggaagaggaggtgcagcgggtagccgccgatttccggcagcgggagagccggtcggtcaagacaggtgagccgctcctcgcacagtacgaggtgcagccgcccgtgcaggcacagcagcagacccaagccgggcagcagcaacagccggaggatgcgccgcagcagtccgccgggcagaccgaacagaacccgcagtacaagtaccgcccggaggacatcgactggaacagcctcgctgccctcggcgtgcagcgggaacagattgagggcaacgggatgctcgaccagatgctccggggcttccagaccgacaagaccgtccgggtgcatttccacttcgagggcatctcgcacagcaacgatagccagctctcgctcaaacccggcacggacggcaggctgaccgtttgcagccacggcatcctcgacccggagaagatgcagaagcagttcttcggttacgacatcaccgactccgacaagcaggtgctccggcagacgggcaacatggggcacccggcgaccgtcaccaaccgggcgggcgagcaggtcgaagcccttgtcagccgcaacctcaagaccaacgagctggtcgctttcccgctctccaaggtcaatatcccggcggagaagaacgggcataccttcaccccggacgaaatagcccggctcaaacagggcgaggcggtggtctgccagttcctttccagagccaaggagggggagcaacccaagatctacccggctcccgtacagttcagcgcagccaagatgcagctcgaatttctcttcggcgaccggggcaagctggcgatggatgcgtacaagacgaacctgaaacagaccgccaatcaggaggtgccgaagactttccgcaagcaggagcttaccgagaagtctcgcctcgaactcgaagccgggggaacggtcaaggtctccggtctggtggacaagaaaggaaaagcctaccaaggctacatcacatggaagcccggcgagaagcccgccttcatgtttcccaaggactacaaggcggcactcgaagaggggcgtgtcaagcccgccgtggagaacgaggtgcaggtggcggtcaattccgagggcaagaccgtagaggcgacccgcaacctgaaagaagccctgcaatccgcacagcagcgccccaccggggagcagaaacagcagcaggagcgcaagcaggagcagaaagaggaacggaaacagtcacagaagcaggaacagcccgacaagcccaagcgcagccggggtgtccgccgctgatttcccccgccactctgtaaatgaattacacggttatcccgtccggacgacgggataacttttgtcaaaccgttaaattttaaagaaatatgattacagcagttatcgctgaaaagccttccgtagcgaaggatatagcaaacgtgttgaatgtccgagagcggcacgatggctacctctcaggtaacggctacctcgttacctgggcgttcggccatctcgtccagcttgccatgcccgaagcatacggctatgcgggcttccggcgtgagaacctgcccattctgccgcaggagttcaagtacatcccccgccagatacgggagggcaaggagtacaagcccgaccccggcgtactcaaacagttgaaggtcatcagggaggttttcgaccgttccgatcgtatcgtcgtggcgaccgatgccgggcgtgagggtgaagccattcatcggtacatctacaattaccttggctgccgcaaaccctgcctgcgcctctggatctcctcgctgaccgaccgtgccatccgggaagggctggacaacctcaaaatcggaagcgactacgacaacctctaccgtgccgccgaagcccgtgctatcgccgactgggagattggattaaacgccacccaagctctcagtatcgccgccgggcagggcatctactccctcggacgggtacagacacccaccttgatgatgatctgctcccgttatctggagaacagggatttcaccccgcagacctattaccggctgaaggtcacggctgaaaaggacggcacgcccttcgccgccatctctgaattgcgttacgaaacccttccggcggcaaatgccgctctcggcgctgtaaccgcaacggggacggtggaggttgccgacttgcagcgcagggaggtgagccaagaacctcccttgctctatgacctgaccgccttgcagaaagaggcgaacggcaggtacggcttctcggcagacaagaccctctccatcgcccagtcgctttacgagaagaaggtgttgagctacccccgtaccggctcccgctacctatcggacgatgtgttcgacgagatacccgatcgtatcgccctgctggagcggtacccggctttcgccgcccatgccgccgccctgaaaggagcttcgctcaaccgccgcagcgtggacgcagggaaagtcaccgaccaccatgcgctcatcatcaccgagtgtctgcccggcgagctgtccgccgacgaacgcacggtatatgacatggtagccgcccgcctgctcgaagccttctccgcccgttgcctcaaggacgctaccaccgtctctttcacggcagggaacagcgtgttcaccgccaaggggacggtcgtcagatccgccggatggcgtgccgtgcggaacgagcgggaggaggacgacgagggaacagccgctttgccgactttgcagaccgacgaggctttccccctgcaatcggcggagtgtgtggagaaacagaccaagccccgtcccctgcacaccgagagcagcctcctttcggcgatggagcattgcggcagggagttgcaggacgacgagcttcgagacagtttgaaagggaacggtatcggcacgcccgccacccgtgcctccatcatcgagaccctctttgcccgtgactacgtgcgccgggagaagaagagcctcgtgccgacggacaaggggcttgccgtgtatcagatagtgaaggacaagcgcatcgccgatgtcgagatgaccgggcagtgggagaccgccctcgccaagatcgagagcggggagatgaatcccgacagcttccgcaaggccatcgaggtctatgccgcccagattaccgaagaactcctgcaagtgcaggtatcggtggcggacggcggacatatcccgtgccccaagtgccgttccggtcgcatcctcctttacccgaaggtcgccaagtgcagcaacgtcgattgttcccttaccgtcttccgcaacaagggggagaagcagctcaccgacagccagattaccgacctcgtgaccaaaggcaggactgccctgatcaaaggattcaggagtagggaggataagcccttcgatgcatacctcactttcgacaaggacttccgcatcgtatacgggttcccgcctcacacggacaagtccaaaggaaaggagcacaggcgatgaacggcatcggttggatctccgtagcggaagccgcccggctctgcagcacgaacggctcttgatagacaatggtagcccacaggaattcaagtttttatatccgtaatcccggcaataatccctatatttgccaatcggtcacatagaaaaggcgggattgctcttttctgtggccggatggcaaccgttccgggcacaatacccgaacggctttaatcaacattcaacaatagcataacatgaattttgaacaattagcaaccatcatagccgacacgcaccaacgattacaacagagtgcggtcaaagccgtaaaccagtgccagaccatgcgtaactggcttatcggtttttatatcgtggagttcgagcagaacggagaagaccgtgccaaatatggggaattcttattgaaaaacttggaacaaaaagttaatttaaaaggattgaatattacattattcaagcgttcacgagtcttctatatggtatatccccagttggcaactgtaataaaaacgatattgcctccaacaggtgcatcaacgatgcacttattggaaatgcagggtcttggaaaaagtgcatcactgatgcacttattacaaaatgctgaaaacaaacaagatatagttaatacgatagagcctcagaaactactcagctctatttcttttacccactttatcgaactggtaaaaatcgacaatcctatcaagcggatgtattacgaaatgctcaccatccaaaccgggctttctgtccgtgaactcaaacggcagataggagcgttgagttatgaacgtgtcggcttatccggcaacatggaaaatgcacttgctgccattcagcagaagattcacccacaaactgtaaccgatgccgtcaaggatgactatttcttcgagttcctgaacattccgcagcaacgggcttctttgctaaaggagaaggaactcgaaacacttctgctcgaccatttgcgagacttcattatcgaactcggaaacggcttctgtttcgaagccagacaaaaaagaatccttatcggtgacgaattttatttcattgatatggtcttctaccaccggattttgaaatgtcatattttgtgcgaattgaaagttgatactttcaaccacgctcatgtgtcacaactttattcatacctgaattattataaagccgaagtgatggagccgggcgataacccgcctatcggcattttgctggtaacggacaagaacgatgcgttggtgcggtacaccacaaccggattggatgaacagatattcgtttccaaataccagttgcaacttccgactgaacaacaattaaaagagttgattttaaagacaatccggcaataataacaaatgcgcaacacatagttgcgcatttgtagtattctaatatttgtcgttccaactatttccgttatctttgcaatcaatagaacctgccaagcctctttaataatgcccaaatcggcgggttgcttttttattacatcctcccgtacaccgttcggattttcccgtcctccagcacttcgctcgaccgtacagcccatatcctgccgtcgttcggtccgcactccagccccttctcactgttaccgaccagcaccggcacggttgtcatcacgatttcatctgccagcccgttgtccaagagtaaaactccgatttctcctccgtaagccaccaccataccgtcgccattctcctttatccgttgcagttccgttaccacattccctctgacaaaacgtacccgttctgtctctgtcaagtctatacagccgttcgtcacgaccaaggtctcctttgcctcaagcggccagtcaagatcattcaggtaaatacgcaggtaagtttcctcgtcaatcagcacgtaggcacaggcgtccactaccgcattgaaacacttgtccgctatgaccggacagccgtcgatggattggtacacgtgcaaggtaatctgtttcataacaatgtgtttttaaggattatgcccgcctcgcaccaaaaagaacagcgtgaactcacactattccggaatagaggtactggcatacctaaaagacagaataggcaaactcacgccgtataagcatacagcatgaacattgcgctatacatcttgtcttttttgaaaagtgccagttttctattccaagacgttcagcgaacgtacaatatgtatatcaatccctgcttgcttccaagccgggtatgaatctttcatgtcatgacagcaaccgtaccccggtagagtaccacctgccgtactttgtcacaaaggtacgggaaacttcccgaataacaaaacaatagccctgcctaatctcacgatccggcaagtccccgtccactaacagaaatcataaaggaaatatcacttttacggaaacaagccttttttcctgcgcctttcctctttccggacttccttctccttccgttttgcagcccgttcctccacagcggcaaactggttgcggaggaactcgtgcacatctttcacccgatagaagaccttgccactgatagtgaaatacggcagtatcccaatggcacggtaacgttgcaatgtgcgaataccgaccttcagcagcaggcacaggtcctggttatccagtacctcctctccatccagcgcgttgctcttcttcagtactctttccaacaacttctccgtccggtcgaaacgttccatgatacgctccatccaattctcaaatttttcgctgtccatatacatagcagtcgccctccttttcaataatttccttttcccgcatgtaacggatgtaccccttcgccgtccgttccttcacgtccagggtttcctgtatcagttcgcatagctcgatatagccatactttttttgcgtgacgaacgctgcccgtgccatttcagacagttccttctccttgcgcctttctttctccaccctcggtttctctcccatatagacaggcatcccggcctgtttgtcccagcggaactgcatcagcgggatatccagcgggcttccatccctgaccttcaatgccttcaccaccgacacctccgggttctcgtccttctcgatggagaggatagccgccgacttccgctgcaactcgctgcccaagtgtccccgcaacttcaacccgttcggcacgaaatgtaccacggcggtgatgcacgtgcggtaaattcccgctaggcggtaaatttcgtcaaccagcgccacgctctccgcctcgtcgttggagcaacggatcaggtcggcaactccgtcgatgacgaccagatggatgcccccgtgcaggtagtggtacttgtccatgctttggatgatggcggtcagccgctcgttcctcgacatccccgtcaggcagtacacgtgcaggtaaggcggcattttctcccgaccggcacgccgcagcagccgccccgtgttcttgtagagctgttgctcgctctgttccgtgtcgtacagcagcaccgcacgcccctttcggttcggttccaccttcaccccaagaaggtccgcgtcctcctcccgttccataattgccccggcgaccaacgcggcggtatagttactcttgcccgtcccttctccgcccgtgatgcagagtatgttctcttccgagcctaacggcacgtccccggcggtcacgatagcgactgcctgctccggcgggcagtcgtaatcgatctcacacgatttcagtaccgccatcgtgtccccgtacagcgtgtcgagcagtttcaggaacagccccatcaaatcctcccgtgtgtgtccggctttaaaatagtccgtcacgtctttctctgatttcgtccccggcagcggtagtaccagccgtttaacaccgtactccgacagttgtacccggtgcttctccgagcattccagccccgtcttgtccgtgtcgtacagcagtacgatgtgcttgaagcgatagacgagcttccggacggtcttcgccgggattaccgaggtttccgagttgaagcagatggcttggaaaccgtgagccgcaagcgtcatcacgtccttctcgccacccgtgaggaagagcaggtcgcccttcgagggcagttgttccagaccgaaacagtagttgtcgcccgtatgaccgccatagacgaaacgcacttccgataacgggcggtacaccttcacgccccatttccccctgtagccgaacatcggttccgccggggttgaagtaaagccgaacgtcttgccttcccttgtctcgctccggtactcggcgagcgacaccaccccgtaacggtgcagcacctctaccgtgatgcccgatatgccccagtaggcgagctctctctctgtgaaagacttttcagctacttggtaggggcttggtccaggacgctcgcgggataaatctttcccttccgtgcccgtgacagtatccccgggaatgctctccccggtattttccccctcacttttctctcgtgcacccgttacgggccgtgtcgtccggcagcttccctcccgattgttggtaccggaagggatggccccatccaaccccaggcacaactcccggtcaatggtgtgcagcacttccacgaaatcagcggcactccggcagtccagtcctttcagtttcgccacaaggaagaaacagtctcccgaatactcaccgttaccaaagtccttcatcctgtacatcccgctgtggcgatcataataaacgttacacgaggccctgccatcagcgtacagcggattcaggaaatttcgacccacccgccattttacgggcagataatgacggaacacctccagcccgttacctgtttttgccagtatttcctcttttcttaccatatgatctgcttttgcattggtgtaaagggtacgcttcaatcattcggtccaccagcttgtcaggcgtttcccgtatccaacgctcatggaactgttccacgtccgtacggcggtaacgtatcttcctcccgcagatagagtaagcgatgatacggttcgtgcggtaacgctgcaaagtacggggactgatttcaagttgttcacacacttcctttcccgtcatccatagccctgccttcctcgtacccttcttatccgctaccggccattgctcccgctcctttgttccggacgcctccacgtatgccgctatcccctctatcttctccacgagggtagcaaacgctttgctttcgattgctattatttccataatcttttaataatttggtttccggttacaaaggtcagtctgttcgaccgtttttcttttcacgttcgtagcaagctgccaaagttttttttctggtacaaaaaaaccgccgcggagccttattcgggctctctacggtggctatatactgtattttcaccaaatggcgtatcgggaaaggtgatttggcaacttgctatgaacctgccagtctcttccttgttttacaaaaggttatccgtccgtttcgtccattcgtttcaacaaacgttccttcatttgatcaaggtaagctgtccggctgttcttccggttacgcatggagataaacgtgtggtacacgtctcccaggtcaatatggaacatttgttcgaacagcatcacgagctcgacaatgctcaccctcccgttatccacgctacccatcgcccaaatgccatatatcagttccacggcagccgccttccggtccgtccaatggtgctccttttcctgcacggcatacgccccctccattgccagcagcactttccggttcagataaccaagtaacatttccgccgctatcagtcttgcggccaacaagtcataaccggttgacatcaccgaatcctcctccagcataaaacttccgctttccgggctcagctcctttttggcacggcggaaatagtaatggtcccggtaagtcgccccgctccggtaatactggtaaaagggaaggtatcgttccagtttccgctggtattctttcatagccttgcggtaatgcatccgggcaatctccgggcaacatgaacaaccgctctcgatctggtatacccggtaataatacagcaggcgtcccgtcagggcaggcttgtaatacttgaaaaagcagatttcctcttccacgttggagaatgggtggtttaggacatagtccttcaactcacgggatcgctccctcaaaaaagaaaccatctcctgacaagtccgtatcacttgctctccctccatacgggaagattcaatgcccatcttacgttcgacctcctgcatcaagttgttaaagtacgtttctatcatgttattccttaattatggggcacgtgagtaccttcacgctacccgatttatttttatgcctcgcttgattcgatcgcaggttttcctttcggccctttacgatgaaaaaacttttcctcatatcgaaaagaccggagaaaagccatgatacggcttcctccggtcacacctgcaaaactgggaaattccttccccaatccccgggaccagactattcaaggtccctcacgcaacgcacgtatcccttcctgttattcacaagcctgtcattgtcacccgcccactgggtatccacggtcgtgacccatcggagataaccatggagatacatctggtagccggcactgaacgatcttgccccgttcatgctacgcttggaaaatcccgtccgagaatggagaacttcagattctactactcccagagaaggaaggtcattaccgaattcgtaaacctcctttttctcagggttatgccagtcgaacaggctcccgcacatgatgatcaattccacctcgttgggcacccgccaggttcccaggtcgctcttgtccgcctcctggtaataataggcgcacgggctgtttccctgttcgatgtccgccatcagcgtgctccaatcctgtaagtaatactcgctcttcctgtcaggattattcaaatccttgggcttatctatcttattggcgatatacttggccacctcaaacccgttcttgtaaatggtgttgctctgggagtcctcatcatgcgcgggcaactcgtaaatggctcttactccacgcgtcatgctgtatggcaggttatctgccctaaagaccagatattcctctttcgtcctgttattgacaagagacttgttcagttccttgcccaactcctcgatgtgatagctttcttccccagactccagcatccccagatccctgatcaacctcacttccgagtagggggtgcggtccccgggtgagttccctcccttgtaataatcaaagtttgcgatgggagtcacgctgcgggactccaagatacaaatataggggttggaagagtataaagaaaggtttgtacttgccataaaggctcttgacatataaaatgctgtggcgttgtccgagggggcgtgcccgtgcagcctggaatgtaacggcaacgcccgttcccccacgagaagcataccgctctcgctcaccgaaggaatataccacttcatctcggcggcctgcatccggccatcacggttatcatcccggttccgtaaaaacggggtgaaacaggcatattcggcgtggtaattcttggctgccaaattataatggtctctgctgagagtcagcttcgcgttgtccaccttcgtcatgacctgccataactggtcttgtttacttcttctcatcgggtcaatcatgacctcttgactgaagtcgcccgaccttgccatcaccttccaggtattcgaccagccgttggatgtatatttattataaaaagcatccggttctcccggagccttcaccataaagtccaggtccggtgtctcgttcacgttttccaccccccagacacgcatgccttcgggtccctccgtaaacaccgtcttgatggacatctgacggatggaaacgacagcctggtgataacgtgactgcccgtcgggggagatttcatgcgacgtgttcaccagcaggtcgaaagtccgatccggggcgttggcaaaggttttccacaagttcttgtcctcgggggcgccatcccgcatggggttccgctcgtagaaatactcgttggcgtaaaccgtcaccttgcaaagccccgtggaggcattaaatacataatcgggctctttgacaagtcggtaaagaaactgttccagcgaaagcagatgctcccccgtgttggagtaatattccatggtttcgtttccattgtcagacagggtgctcgggtggatgaagaacgcgagccaaccagtgtctgccttcttctcccctgaaggaacgtatccgttatcctccagctgttccagctccgccctcgtgtaagagactatcttgtcacagaacggggtgcgtatggcaaaggagatcatcgcgtcgtccttcaaactgccatccggattgaagatggcaagctcgtccttgttgaaacgcatcaggccctgttcataatggcagtcaaaactgaaggagcggtgagcgtcatatacaaggccttccaccccgggagcgggctcctcttcccggtccttgtcggacatcgcctccactaccaggtcgttcatccccttgatcgtcacgttataggtatagtgcacgttacgttctatatcataatcgttgaccggatcattctccgccgtgtatcccagataaacgcggtaggtcaccctcccgaaacgctccgttgagacttcaccggttgtcatatcctggcgtaactcacccgtgaactcgatgtagggagccagatccggagcgtattctgtagctccgttctgcacgttcggcttctccgtagcatcgggaacgggagacttcacttgtttctgccgcaggtcataccccttcctctccgcattgtaaccgggagaggcgggagttatcattttttttgccaatttccggttctccggaaggtaaaacgtagtagtagtagtagcgtcgccctcgaactggaataattcggacaaccagtacgaatccatctccatcccgccggcatcccagggagccccggcgtcactgcccttgacatgctcggtgacaaaggtcgaagccggcacgttaccgactctccatgtcccgggcacgaacgtgagcccctctccggttttcaggttgatcgtgattttcgcctccgcacgtttcagggagacctcgaggcgcctggtgtcgggactgatctcctccgtcttggtaactgacatcagcaggttcccgttcggtcggaacagggtacgggcggtcatctccgccttgaccctctgaatgtccgaaagggacgacacgccagccaggatcccgggctctacctgaaacagcccgtcaccatccgatttatagttcgccagcaggaccagcgtcttctctcccgaggtaatggggatgtttttcagcaatcccatgctcgtgggtgcatccgtgtccttctcgccggttgccgtttccaaggcagcagcggcctgataaagctccgcacggggatactcccgggagaactccacgccgccgcgggaatcgaaaacccacaggtaaaggtcgtatatctttctctcctcgccttccggcaggcccgaacgtgtcttggccctgttggctgccgtacccacgctgatatctaccgtcgtgggcacgccttccgggacaccgctgccccgaagcagctcctcgtccgtacagcaggtaagaacgggcagtaacaaaagaatgaaacaagttattttcagcctatatgctttcatatataataaaaatttataatgacaaaatcgtgaacatcactgaaaaggagggaactccacatccttccgctcccaggattcgacccggtagataatctctctgtccgcggcttccggcaagaccatgaataccttataatcccggttcgggtaaatggggccggaatacaccccgggagaactttcctcgccaatgtcaagcaaaaaggtccttgtcctggtctgtgagatgtttcctcctgtataatactccactgtcagctgtatcttcgggtgagggtgtccttcctgccaggaattggcttccggaatatacggggccaggtactggggaaggaagaactgctcgtatttttgggcgtccatttccgtatagtcaatccctccgccggcattgaggggggcctcgtagatggtcagttgcgcttcattttttattccataggaatacgtgcccgtatgctccgtgttctttcccgttcccggggtggatcctgcaagctggccgccgtccgagtcattctccctgaaagaaggagacatcagtaccggaaagttcaaaaaggcaatccttttataattataaatgatctgctcaaagggggcaatgcttgcgatgtatattctgacacgggagaaatcacggaacagcgggattgtgatatcctgcacctgctccccggaagcgggctggacggccgtggacagctttcccgaaagcatgcccatatgcaacctgttggatattccgggagcgtcatcccaagagatattggaagttgttgtccaatctataatcttctcatccgacggggaaggagtcacaccatcgtacgggttgtccaccggaatgccgagactgccgtcatcctgctccctgatgatggcagggaatgcggcttcgacaatatcctccctgtccacctcctccatgccttccccgaggaagtcccatggaactgcgttctgcaggattcctccgggcgtataatagggcaggtcctttcctgtctggttgggggcatagaaagcatagaattcactctcgcctttggggatgcgtatcttggtttgatattccccctccgcgttgcccgaactgaaaggaagcaggcgactgtacacataccggttctgctccttgttgaaaaccataagtgctattctgggctgtgcgggggcttggggaaacagtgtgccggttttataccagttggccggatcggaggaataaaggtccagcatctcacttcccccggctgttacgccacgggttgacaggttcagcctgacggtcacgtcatcctctccggaaagccgttccgggatatcttcttcgttccggcatcctgtcagggcaaggaaaaagagcggcaacaccgtcatcacaaagttcctcaaggcccttaccgtgcgagtatatttagtatctttcagcataatattcatcaatcggttatgggaaccacgtcaacggcttcccagggttttacacttactgtcagagaacggggattctggcggaagaacagtggaagcaccgcttcctgccgccccgttatccgtatctggtcgggatacagagcgatatattccgcgacatctaccgtgcagagaaccttatctccctgcataagacggatcgtcagcgggtccccgtccttgaagcgcagggtattgaaatcaagcacgaaacggtcgttttttcctcccgtgtaaaacggaaggtcgaaggatgtttctccggaacgctgcccggaaaaggagaaacgggctgagagcgtttccatcgtcaggcggaagcccgtccccttgttctgttcgtaccaggtcccggcgttctcatcgtcgtcgggaaggactaccgcatggattttcacgtgctgggaataaagtcttaccacgtcacgggagtcgttcatgaccttcgacgtgatggtggtttccccaaggtatagcctgtcaaacgtgccggccgccggtccgtccttttccgccagttcgggccgggaaaccgacgcttcaccgtaagcaccatccccgataaccgtctcgttcaacgcgttgcccacggccactactttataatcaccttccgggagcctgacctccagcggtgaaagcagctgttctccctccaggtggtgtttctccaccaaggccccgttcccgacgtcaaagatgaagacgtcaatgtcatccacgtattcctgcagatgttcccggttgtcatcggccaggtaggagaagacgatcgtgttgccaaggcagccgctcaggtcgtcatacacccggtcacatgcggtcacgaggtataaagcggccaacaggcccagccaggtcggtatgtttcttatgttcatactttacactaattattataaatcaatactgtaattttcccgaaagagaggacacgtttccctcccgcgggtaataaaaaagggaggggacaaactttcccctccccgagagtgcggggcggattccggtaccggcctgtcagggccgatacgggaaaagcgctccggcaagcggctattactctctatctgtatcagtcaaggatggggaatacgttcacagcggtccaaggctgcacctcgacacggacgatgacgttcacgttctcgtcctccaaatccccctgtccgcccggttcgggagtcacaccttcaggaatgctcgggtcaacatccacgaggataccctggcccccgttcagcgcagcgagatccagattgatcaggtaaccgcccttgccggcttccagatccgtcgtgcctgcagtttcaccttctgccttcgcgtaaccggatataacgacaaaacgtctgtcggcggatacgccgtcgtcacctgtcttgaaaacgaaagcaagttttggagcgttgttttccttaccgtaacccgtaatgccgttcacgaagaagttaaacgctgcggcctttgccccctgtgcgaaatcgaaacccgctgcattgaaataggaggccacttccgacaagtccgtgttaccgtcgggtttgaacgtgccgtcttcgaatttatagcggtctccggcgtaggtcttggcccagaaccagtttgcctcttcttccactgtaagttgaggaacagagagcgttctgctgaaacggttcatcaggataccttggtttgcagtggtcacttcgacaacctgcagccattgactcaggctggtctgttgggcaatgtcagacttgccgtcccatgtctggccgttgaagcctgcggcatcagccttgaaagcggcccacgcttcggcactgctctttcccttattttcatccttggccagccaagtcgtgcaccattgttcagcctcggtctttttcccgtctttccagataaccttgacaaacttggtaccggtcacctggaagcggttcatgctggcggtcaaggtgagctcggccttcttcacggtacgtttgtcttcctgaggattgacgccataaggctcggcgccaacagtggtaagtgtttcagaaccggcataaatcacttcattaatttgggctttcagctgttgtttgctgatttcagcaacagtctttccctcaccgtcaaccaacgctccctgagggttagcgataacaagtgcctttgtcacgccattgtccacgtcaaggaatttataacctcccgtcgttgcctctgcacccacggcagtagccgaagtcagcttggtaaaatcatcagtatcttttgtaaattccttcgacaggacaatgtcttccccagccaccaagtacacatgcagtttttcaaccgatgccgcatcctggtcgttggcggtgttctgcaattcgcccatggcggcacgtgtgcccggaccgggtaatgccactgacatcaccacatcaaccggttggttgccactctccggcgctaccggattctcttcgttgttacatgcagcgaacaacgccaacgaggccactgcaaaatacttcattactttcataattcgaattgtttttaaattaagattactaatactatatataactatgtctgagttacatctctatctgctgattgtttccaccgtccccgggctcccctgagagtttttgtttgccctgggccataccggctttcttgatcaattcttccgccttcctccagtcacctttcatgttataggcaacggccatgggaaagaaagcacggctgtcattcgttaccggttccaacacccgcaacgcgccgtccgcatcctgcccgtatttcaacagggcgttggcgtaattcaggattgccacggcgtcatccgggaactgcccgtaggccctctcgtacaccggaaggggagacatcccccgggaagcgtacagtccggccagctggtacatctcgtgctgactgagacactcgggtttcgtttcaaaaatttcgggaagttcctccaccgtgtaaggtctcacgtcaaaactgagaccgaaagtcgtgcgccgcagtcccgggtagaactcttcgaggaggaggcgatagctcctgccgtcatccaaggcacggatggcctcctcgcgttccgtgtcacgctcgttatgtccgatgataaaaagaatttcgtccctgttgacgagggtggagccgctgaccatcgatttaagaccctcccagtcctccccgataccctcggtacgataaaccggtgcatttttcaaggcggggtattgacgcgaaatataatctgaaagggtttgggtgcgtcgttgcgcgagggacctgttgtaatcgaagctcccctcgggagaggcatagccttttatatgtacctccttgagtgacgttccttgaatattcaggttctccgagagaaacttcttcagcctgtcaagctcctgagcattgcctgcaaaatcttcctgcaggtcgtggcgtgcaacaggaaagaccaccttacagtcgaaggaatccttgtagcatttgatcatgaccttttccggttcgatgaaactgtaagcataatccttttccccgaagagggggataccggcctgaaaggcaatatcctcgctctcgttcgtgccgcactcggcacagccgtacgacacctccctgacaacgagacgcccgtcagccatccaccgttcaaaagggacgctccttttcacagtcaggcccgaactttccagcaccttggcggaacggacctcgccggatccggggttaccgggtttcaggttgcccaacgcctttcgacgcttgatcaccttatatcttctcttgccggccacgcagaccggttcgaggcggacgctgtcacgcccgtcagccgagacatagacggggaacaggtaagcgacttcctggcttccaagccctgccagagggaagacactgaaagtaatatccaacgcatctctacccggttcacgctccacacggctgtttgaataatcccaacgcgaggtacctgacgttgataaaatgtcctgggcggaagaaaacaagggaaacattcccaggcagcccatgataaggatttgcttcttgttaatatggtaaggtttcattgatatacatttttagcatgatagaataaaaaattgtgtccccggattcagggagttatttcaacatgtaaataattgaaatggcggccctggtgggacctatgtagtccgcatcccccttgcccagcttctgcccgcaggtggtacacttgtacttgtcataacgggcgtgcacgtaaccgatacccaaggaggcctcgatattgaaacggttggaaagcacccactggtaaccggcgctcaacccgcctccccagaaataaccctcgtaacggtggtccttcatgtttccgtcccctttctgaagcacgaaggggacatcgacacctccgatattcatctggccgccatgggcatgcaacccgaagaaccagccgttgaaaacgtcacaggtccaataacggagctccggctggacaagccagtgactgaacttctttgccttgtaccgggaagacgtggcgtcccgcgtgtagaaaaagaaattcatacccacctgtgtgtcaagggtccatttacgccccatggagaactccaaggagaggttgggagttttcaaggcatcgtaggccagattgttcttcaaggcaaccttttgagagaaggcaccagccgaacaaagcaaaaacaccagaagaaaaaacggtttcatcatactgttattcattgtttcgttactttattttataagaggacaagccaaagttatccttatgtaataatcattaataaaaatgcagcttcccggaaaaaactccagaatctttcttgcacgtatagagtggacggccggaaactcctgcccgcaccagaaggacctgcagggacgcaacccgcccacgagacttaaaagtctttcagccgatccggcgaaagccgaatagaggacaccgtcccgagtatgcaggtaaatcgaatccctgttggaccattccatgttgaatatctcatgactcattcgcataatgtaaacctttattcgatgactttcttattttccactctctcccgtagagagtggaaaatttttcaaaatccgctctggaaagcggttatagatgccaaaaagaaataaaagatgaaacatggacagattttatcatataactaactgaaaataagattactaatattttcattaggcaacaaaaacagaaacaatggaacttttttatttgaacgagcacacgtcttgttataattactcaaaatctatgcaggagggattccggtattataaatttgacgaaggattgaaccacgaggaggaattggtaaaagattgtatcctgttcgtactcaaggggagtctgcaattctcctgcaacggttttcagttcactgtttcatcaggagagatggtctttttttgccgtgacagcctgtttaacacccaatcactggaaaaatgtgaagtcgtggctgccctgttcgaggggggagtatggccctgtcaaagggcctccttttcagagttataccacctgagggaaattgtcgaatatcgtatggaacctcttgaaatcagggatcggttatgcaaatttcttgaactactggtgtgttatctggaagatggagcgaactgtatccattttcacgaaataaaactcaaggaacttttctggaacattcgcttttactattccagacaggaacttgcgaattttttctatatgattataggccgttcgcaagacttcaaaaataaggtcttgaacaattacaaaagttgcaggaccgtaaaagaactcgcatcggcctgtgatatctccctttccgccttcaaaagacagttttccgcggagtttggagaggctccagccgaatggatgcagaaacagttgttgggagaaatcaaatacaaactttcagttacagacctgccgttgggaaccattgccaatgaactggagttttcctctcttgcacacttctccagattttgcaaaagatgtctgggatgttctcccagagagttaagacagcagataaaaggcggttaaacaatctctgaatgggggagataagaaattgataaataatagagccaaaacggaaacagccaacaaaattattgtctttaaatttgcagcgtaatccaaataaaaaaaggattacgctattttttaacacatactgtaagttttttcttattttccactctctacgggagagagtgaagaaacaggaacaaatatacgtatattatgataatatactataattaaagtgaaaaaaatatcttatataatagaatttaactaatgtagaaaaatattattattccattaaatcatctgtttacccaacagatgccggtccaaaacgtagataccataacatgtaaatccctctcgtagccatctttcaattgaagacggtataagataaattagctaaataaggtgttccttttttttcctgtataatcccgccacgtgcaccaaggcgggatttacagaaacatccgggaatggtaaaattatcggtggtaaaagcctctttgggagtgcttaaccgccgtccatcgtccagacgggaactgaagaatttgagctgatatctttcgcggtcgggcccggtcaatcatccaccgctaaaatgaagtcagccacttgattattaaccgcatccagtgcggaatgatccagttctttcagatagattcgggtcgttttttccgacgtatgccccagacactcaccaataacatgaaccgaggcaccgttcaccttggctatcgtggcccatgaatggcgggccgcgtgaagtctcagcgggaattccaaaccaatgacccgggaaatctttcccagggagtaacgaatcctatggtaggcacttctataaccagcgtacggatcccgttctgccggaaacaacgggaagatgtattctcccggtacattcttgtatctttccaggatacgactgatctccttgtttatacctacccgcatcaattgatcggtcttgtgacgcctgtaacagatttcacccgggaaaacatgcctcttttttagcaatgcaatatcgacgaatgacattccacgcgtgtaaaagctgaacatgaaaatgtcccgggcaagagataacgggctgtccttttccagttcaattgcggatagtgttttaatcacaaccggatcaagggagcgtttgagagttttttccgttttaatgcttatatcgcgaaatgggcaaggaagttccaggcccatctcccgacatcccttcctgaaaagagccttgatattatgcagataaaaaccaatggtgttatcgcatatacccgaagcgagtagtttcccctggtagtcggaaatgatccgggaagagagttttatgaaaggaaaatccttttttcccaggtacctctgcatggaacgcaggctggaggcgtatgcccgggctgttccctcatgaccgctttcacgaagctctcggattttccgtgaaaaatagaaataaaaaccggcttcgcgggttaacacgccgtaagtcctgaatacgtcctctatttcgtattcccgggatttcttctctatcattgaaatacactttaacagtacccttgagatactttcgcacctgttgttgatcctccgaatcgactccggggtgttttccccgccgtcgataaccctcccttttacgggatcaaacagggtatccgggatactgaatcctgtataaacaacctttttccttcgcttgtgaagaacctgcacgactaacgggaatttgccggaccggttgctccttccttttaccaatactgttttaactgttgccataagttttttattagttagacatttgacgcttccttgtttcctggaaaggaagcataaacttatatgcatcaaatcggaaaaagaccaaaaaagttcagtaaccaagcgggaaaattgcacgaaagacgggaagtcggttccagacccgtcggtaagggaacggtacgtcttgtatgtataggatttttttcaacttgccaaacatgaaaaatggaacagggtgagatggtaaagcatgtcccaatacatccccaagtaaaccacggggattaagcatggcagatgggattttttcgttgcacaagacaaaaaaggcggccccacctgccgcctgtagattgataaagagagaattccatcctacgcaagatgatcaaagccatatggatccagcttccacatcccccgcctggtaggtataggaaatgaactcctcaagcgcctccttccatgtaagactgaaggttttcatgatggagtgtagcgtgcggttgctgtcttcatccaggctatcctccccgatcaggttcacatctgcctccgggtccacatcaacaaactcctcgcggctccaaaacaccactaccgggatgctcaggttaatatcccatgttccacgctggatcaataccccggagggcttgtagaacgggtcaaagccgtttgtctgcgggttctttttagaattgtagccgtgatacaggcggagtttcaggtcaaactccttgcggtccttcaggaaccggataactccttttaatcctaccgggttagtgcttcccgtaatttccgcctcgttgtcatgtttggtcttgtcccagggcgtggtatccacatagagataatccaccagtgcctccggatcattgtcgtcagcttccggtttcccgtcaaaggtaggtctcacgttctccggggtgaagaaatgctggtggatattctcctgcccgttctccacgaactggccgttcatcaactctcctttggaattgtagtaatagataaacatcaggtaaaccggggccggggtaaagttgtttccatttttatattcgccgtttttctgaacgtaaaacttgccctggcttccttcagcaagggtccatccactgccggtcttcagttcataagtgatctcctggacacgtttcatatacctggccggggattccggattttggtggggacctccggccttctgtatctcgttccagtcagcgtgcaggtggcattcaacgaggcggacggtcatttttgccgggtcctcatgcagtttgttcttcgtctcgtcttctggtattacaggatccttgctgcaagagttcagcgacaggacaagggacactcctatcagaagtgcccacacggttttacatgcaattgttctcatttttctttttatttattagtgttgattatagttgttataaattaaaaaatccagtttacaccgcaacgcacatcacgtcccatatcatgcgcatagtaacgcgagcggttggtgtattccttgtactcacgattcaggaggttgtctgccgacagcatgaaccggacctggtgtccccgtttcacgggaagttcaagagcagcgtcgaacccgaggagatggtacgccgggggagtatacgggataagatccgtgtccggatcaaaccgcctctgttttgcggtgaaacggtgcctgatgttcagacgcagcctgagatgcgatttcgtctcgtgtatccacgcaagttcatggctgaaacggaaggagggaatataaggaagataattaccctttgtccgttcgtttgcccgtataaaggagacgacggcatggtagtcccatgaaccgcccggagtgaaacgcaggtcaaagtccataccgcggaagaaagccggggtctgcctgtactggaagaccgggtatgctcccgaaatcacggtgactgtctctttctccggcccgtcatagatatagccgtccacccattgcaggtaaccgtccagacagacgctgaacatcccgtcgccgtaacggagggaagatatccatttgtagcttctttccgagtgcatcgcagagtctcccctgacaaacatcccagacccgagctcgttcccgttgctgtacagttcatacacgtgaggggcacgccaagccagaccgaagttggaggtgagcctccagcgtctggaaagttgatagtgtcctcccaggctgtaggacacgttgttaaactttcttgtcccgccataggggcttcccgtccagtcataaccactggcacgggtttcctgcatatccaggcggaggcctgcttcaacgcctcccctggccaggtgatatttcccgattccgtatatccctgcctgtgtctccgtgtagttcgggataacgggcacgaatccggtacccgcgcggctgtggttctcgatgaacatgacctgacctcccgcctcgacttgccaggagcggtaatcccgcttccaacgcagaagatgctggaatgaattcaggtgcagggaaaccgccggaatgttagaatccagccgccggacacggttttcctgcctatcgtccttctgccaggtactttgccagtgaatacttccccccttcttcatgccgagccgcatcctgccgaatgtgatctgatgggtgacctcctggcagggagccctgataccacgggagaagggatccgtgtgcagggggcgaccaagccggatacgttccgccagcaggtcctcgctccccatctgggcgctgagcatcacccctgtccggctgtagaagcggctgtagaaaccttccactctcagacgtccgcggtcatagcccagagaggcggaagcgtgatactctctggttcccgtgttgttcagaagatagtgcgcagtggaacggtccccggaatttgaccaggttccctgcagacgccaggcgaaatcaccgggaaaagcaccttcgagctgtccggtagccacgtagcgacgcccgttacttccgtaaagtgcggagattcccccttgaagggagcgttttctgaaaggaagcggagactgctccatgacgataatccctccaagggcatccgaaccgtatcttaccgcatcggagcccttgattaccgaaacagaggagctgccgttcatgtccacttcgggagcgtggtcggccccccattgctgcccggtctggcgggcaccgttatggatgatcagtatccggttcccgtacattccttggataacgggtttggatacagtggttcccgtgctgatggaacttaccccgctgacacgttcgagcagggtggcaagcgaggttcccagcgcgttcctgatctcgggagatgaaaggcgccggctcaccacgttgggtgacgccccggcacgttcaccggtcacgaccacttccccgagtttttgtatgtccggggagagacatacggtatgtatgctgctttctttgaatacctcgttcaaaggcacacgccgggaaccgtaacccaggcactgcacgaggaccgtatccatgaaacacgttccatgaccgaaaacaatcattccacggggggagctgacaagtaaccgttccctggtcaggatataggccccttcaatgggaagcccgctttcctggtcaatgaccagcagagtatcgcgtgtacccgtcgattgccggtcagcctgtacccgtgcttccatgggagaagggagggtacataggcagacaacaagcaggcacacatactggagatatgcatgaaatgtcatacttgaaaaaatataaacgggttataatctgttaagacaggacatgaaaagcccctgcacgcaatcacagtgatggcatgcgaatccctcaagggagttatgacaaacacacagggggtgcacggaggaaatgcgggaaaagaatgacgatgacatctgtttccccggagataagataccttacaggcctgccagtcggaatataatcgtatataaaaatccctgcctcgacaaacggggagagcgtaaagagacagatggtacaattttcaggagaatcgtgacgggagtgtccctgttcgttatgggatacgcacgaatgttccccgtgaacatgaaaagctttcacgaggaaaaagggcatcaatgtcagcaacaacatacatgctatgacagcccgctgtctctgtctttttttcgtacgatccattagtttgcaaaattaacggttttaatcatcactcgcaatacctacaaataatgatttgcaagcataaacaccatgtatatttgttacggataccagacagaccgttttattcctccaaccagtcgtccgagagcccgaaactcctgtcacgaaacaattcagccagacctgagatttgtttgaaacggagtaactcgttcttgtccatgcctatgttgcgcatgatccagctgtcggacatacccgattttgacagttccgccacaatacctgtcataagttccagcgagtgcattcccctggccctgttatgacggatagtcgaggccatcctgttcgagatgtctttgtttatgaccgttacaggcagcaatccgttctcgcgcttgtaaatcctgacggatgttttcataaccagatagcggtggtaaccgtcaaccagctcgtagatatcctcttcttcccggtaataacacacgaggggcatcgtgtaaccgtcttcccagatggacagttccaacagcttcatctccgggggagcaacgacattcgggttatagctgttggccacgattttctcgactggcacggccttgacgttatacgccggacttttaaaacttgacatgacaatcacaatttatatcttttcaaaactctctctttcatctccctctcccgtttggtctgcgtgaaacccatatacttgcaggtatgatcgtttttcaggatgcagacgcacattcgtttgtaagtgggtatttcacgaaattcagggatatctatctcgtctatatactccatgcggacgggcctcttgtcagtccggtatgtcgtgcattcttccaccgtgaacggtacaccggccgcacgcagcttcccgatcgtttcctctcccaggcagcctcctttttctctccagaatttctggctcaccctcagtttctccaggtagttctcccttgtcgcccggggaagcgtgtcaaggaggaagtacatgtactctttccacgtgaacccgtccggacaactgatggagcgccagcccatcgcaaccgtgttcccgtacattccggcgaaactgacgccgttgacccggctgaccatgcgtccccaggtatccggatcaataactttataaagatgtagggtcgaaacggcctgtgagataaacgggctggccaccctctggcgggacaagggaatcccggcctggtaatacaagtcatacaaacggttataatcccaaccataccgggcataccccgtccacacgtccgttgtcttccagtcgtacatcgggtaggcgttataagtgtaatatcctacacggtgagtccacttgtagttggccagcttacggtaattcttgtcggaatgaatcgcccgccaccggttgaagctctcctgcgtgcggatccccacgaggcagcaaacacgcttgcatcccttcttacgacgtatccaggaagggaaaagagactggaagtcgtaatcccacaggctgtcgttccagaaatcaaaatctttcacggtaagagcggtgcccggcatctggcgaacccagatattctggtacccctcttgccagggacgccagtactgctggtacatggaagtacatgtgggtaccttgaaggggacacaacagtggaacacttcaaggatatcccggttgttggaaaacatcctttccacgtactccgtgctctggcggtactgcacctcgtaatccatgtggaacacacccagttttctaccgggtgcatgcatgcggatataatccatgcacaaatggagaaggataccgctatccttgccaccggaaaaagagacatacacgtaatcaaaatagtcaaagatgatcttcaatctccggttggcggcctcgtggacatccatccggcgcatcatgccccacctccttcatgataacgcatcttgacatacttcttccactcgacacaggggataaaattcttcattgaaaagtcttccacgtggcgttcgtgtacaacggccacaagggaaccatcagaagaaaaatcatggataatacggtccaataacacctctattacagaggagttatccccgctaatatagtagttatctatgcaattgtttgtcaaggtcattttcacgggcatgaatcccaacaccctttgctcatccatggcaatgtaccagacatggttacgcgtcgttttgaaagggtaattattattttgccgcaatacggccgggttcattaccaaaggcgcgacaaggtcaaaaagccgaccgtccaatccttgtaacttcagaatgttcatgattccaatccgttattactaaaaatcgaatgtgtacctattatgcgtttgtccatgatttccggcattatcatgccgcaagcacgttacaaatgactatccgcaaacatggatatcaatggggacgggaatgatacctcctgagtttccaaaagggagaaaaacataagaatgaacaataatgccacgggaacgatctccacaccccattcccctatcagctcaaaagtcacgtgcaggtcacatacccttctttccgaaaacatatgaccggaaaggcaggagcagagaacacggaaaaaacaattcaaaatttagtacatgatattaaaaaattatacattgaaaatcagaggagcgacccgccaatcaactggtgattggcgggtgccctctggcttaaaataaaaaatcaccttaccagattcgggtttttctgggaatccatatcaggatatggaagatacatcagattgtcactccatgtcctgttcgtatattctacagactcctttaccaggatcccgtcggcgacttcaacagccgtgttctccgctctttccttaaaggtgtctttcagtctgttcatacggaactggtccgcacggcgtgtgacaagggccacccagtagcctgccacctcccaaccatgctccttataagccgcttcggcaaggtcatctgcagaaagtccggtgagcggttccagtccggcacgctcgcggacatcattcagacacttgaatgccaactcgtccgtctgccccgtcctggccttggcttccgcataccacaacaaaacctccgaataacgaatgattctatgccgatggtcattacacatgttctgactggccggttttgtataatcatacggggcactggtattcacttttgacgcaggatcccagttgacggagaatatactgaacatggggtgatgttccggaacgacaggggtaccgtcctccttcaactcccaccagtcaaccaacgttccgtctttcagacgaatcttgggatcataagtcgcatcttttctcggaccgtcaggaaactccttccagaaacgaatttcaccccaggcgtctccccagccgcccagcgattcaaactggttacatgaagtaagctccgaatcctgtgcccaatccacgaacggtgaataatttatgccgagcaccgtctcattattatagttattgctcatagcatacacatctttgtaatccttatcgagcttatactcgtattcacctctgttcacaccctcaatgacctccttcgccttttcagcagcctttgcgtaatattccgttttgttcatcggccagccggccatagccatatacactgctgccaaagtagatttggctgcctgccgggttacatacacattcactccgttcagaaagcgggggctgccactgtaacccgtaggcaatacggcctcagcttcggtcaggtcctgcacaatatgaccatacacttcttccacgggggatagaggtttggtataatcatcgttgacattgtccagattcatcggcagcggtccccaaagtcgcaccagggtaaaataagcgtatgccctccagaatttagcctgcccgagggcgatatttatctcatcttgagtggtaggtgttttagaagccccctgtatgatcaaattggcagcctttacaatggcataatgcatgttccacgcatctttgacacccttgttgttgtttgctgcggcaaacttgtccatttctgcggcaggctgtttgttgctccccggattggtcgttatatcatccccctgccactggggcagctgcatgttcgtatatacctgtgaaagattgactttctggtaaagggcatatatgctcatgttcaattcatcctgggtagagaagaagttttccggagtgagttttcccctgggatcttccgttaagaaatcactgcacgacatcagtgaaaatgacagggcaaccatagtgcctgctattatttttattttcataagttcttctattttagatttaaaaattcatccggagaccgaatgtgaatgttcttggggaaggataggctcccatgtcaatacccgcgtcaacgtcaacgctgctgttcgagaaggtagtaccggccggatccatccccttgtacccggttattgtaaaaaggttctgacagctgaaagtaagccgcaaatcagcgaatcccgttgtctttttggggaaagtgtatgaaagactgatattctccagacgaaggaagtccgcgttctccagccatttggttgaaaccggctgcagattatttccaccttcggtcaggctcgggtatgttgccgaagagccaatcttgtcgaatcccttcagataggcgtctgccagagttacaaagcgggaattcccttcggccgaagccatcgtatatcttacaagattcaaacgtttggctccgaaagatccgttgaagaacaggttcagatcccagtttttataagacagggagttattccatcccagggtgaaatcgggattggccttgccgatgaccttgcggtcgccaccgtctatcatctgatttccatctacatccgtgtaagtgtcatgtccgttttcatccaagccggtccattcatatccccaaaaagtaccgatggcctcacccggcttgataatggtggcataatcaaccataccggcagccggactggagccgttgatgaaatcattctcaccaccggaaaggcgttccacgcggttcttcaaataagtaccgttcaaggtggaggtccattggaaccggtcattctgcataatccgggcggtcacgctcaaatcaataccacgattactgatttcgccgtcattcacccaaaaagagttaccgccgacatatccggggatacttcttttaagcaacgcatctgtagtacgcttatagaaatagtccacactgaaattcagccgcctgtcgaacagggagaactccagacccaggtcgaactgcttggtcttctcccacgtaagctcgggagtcgctatgtcatttgcccaataaccggtaaaattactgttggttccaaaattgtatgcagtagcactcataaggcccatggtcgcgtaaggactgatggcctggctacccacaataccataactggcgcgaagtttaatgtcctgaaccgaggaaacatccttcatgaaatcctcattgctcaacgtccaagctgcggcaatagaaggaaagtacccccatttctttttggcaaagcgagaagaaccgtcggcacgaaatgttccggtaagcatataacgatccttaaaattgtacatgacacgggccactcccgacatcagcgcccattgctcgtaaccattgtttgcatcacgagaggaagccatacccacattccaccagcccacaccctcggtcagcaggttgttaccggttatacccattgtcctggtttcggaggaggtcacctcatatacagccgtggctgtcagatgatggtcattccaggaacctgtatatgtcagattgttggagctttgcagcatcagacgataagtatcgttattgcccataccactcttggtccccactcgtttggagctgaaactataacttttcccgtcataatagtccacgccattggttgtggtgaatgtcagccccttcattatatcaaggcgcaaatcaacacgtccgttgaaaacattggtcattgtctctcccgactgcaactttaggataccgaccgggttggaagctatggaattataagtatcggtgttatagttcccgttttcggccatcatcgtcatggtaggcgaatagttcaaagcaatccagatcggattatccttaccggaggcaaaagatcccccgcgacgcacaccgtgggaagcattgatgtcagccgtgatatgcagccagtcggtaagctgtgaggaaagattcgccttcgcctgataacgctcgttcttcgattcaatgaccacaccttcctggctcatgtagttggcggaaatgtaatattgggtcttctcgctaccattggaaagagccaacttgtaattctgggtgatccccgtacggaaaatctcatcctgccagtcgatgccccccgttccgttctgataggattgcatctcttcgtttgagaaatcaatacctttgacctccttgagcgccagagcgtaatcgtatgctccaaggatatcgtatctcttatatacattggaaactcccactgatgcgtcgaacataatttcacgcacaccggccttaccaatcttggtagtgatcagaacgaccccgttcgaacccctggaaccgtatatggcagtggacgatgcatctttgagaacctgcatcgaacggatgtcctcgggattgataccgtccaaaccgctttcgcggacgattccgtcaaccacatacaaagggtcgttgcttttgctgatggagttagcaccgcggatgcggattttcacgcttcccccggggacgccgctgttctcaacatgaacgccactgacacgcccctgaagagcgtctgcaacctgggttataggctggtccttgaaatttttgttgtccagcacggctacggaaccggccatatccgcttttcttacagcaccatagccaataacaaccacctcgtcaaggacttcggcatcttccttcaaaacgatgtttaacggttcacctgtccaggctatttcctggctctgatagccgacataagaaacaacaattatatcccctttttttacgttcctaagggaaaaatcaccgtcaagtcccgtaatgctgccgtttgtcgtccctttgacaagtacggatgcgccgataatgctttcgccattggcatctttgacaactccttgacagatatcactctgttcgataatttgtcccctcagggaagggtagtcagggaacgcataaacctgcatcccacacaatagcgagagcgacagaattgctcccgctgttttttgaagtgtattcataaattatttagttaggaaaaaaagttcgataagaaacatgttcaggcgttatgctcttttcaatacaagttctgtattctacccggatcatatctccttggttgaaacgctgaaagtttcaataagggtattaccatctgttatatattctttttccaaacggttaacctccttgtcgtcaatgtagcctattactgttatatgaagccgtttacccgcctccgagatactggaaaccgaaccggcacaggtcatgaaaaacgcattcccatttgtacaacaggacatagttgccgtccttatttgggcagaataggaatcaccaatgtattctcccttgtcattgtacaacttggcgggaccacccttgtcagcaccaccgatacttacactcacttcaaatgaatctgtgtcaccggactgttggattacaattttatgaattcctgtctgaaaatcagatgcgttttccgttcgttcattgtcacatcctacaaatataaatccggccaagagcaatacaacactccataatgtgaatttacttttcatatttatatttacaacaataattgataaaaataatatatctataaatcttgccaagaagaatattaatcatctaaggcaaacaaattatctaattaacaacaatatatttattgaatataatacgcagcccattatttattgtgcaaagaaaaaacaagataaaatattattgattatcattttagccctataatttatcaatatggcctaatagtttggaatatataaacaaaatattatacaataagataaatacatcaaataaaaataccttagatttatattacaaaggagatgattatggcaaatttctatgtttcatgtaatgtgtcaaagtataataagagaaatagagaggagctgtaaggttattttaggacaagtcaattcattggtgcaaggtgcagctatatctgtatatagctgcaccttgcaccaatgaattacatcctaaaaatcaatgatttacatttttagtaacaagaataggtgcaaatccttttttgcacttattctgttacttacacttttcttgtttttccgtttacacagaaaactaaaaatctcctgtttttttctttttcggtcaaaattagtatatttgtatcagttctaaaagtgaagcaaagcaatgcactgaaattagcaccgctaccaaatcgctaccaattaccaggcttatcgctctttacgctttatcaatcagccgattaaaagaaaatcttagttttttcacaataattcacaataaagtaaaagcccgctgattcgtaaaagaatcggcgggcctcccattgtttgtttcttaattgcctgaatgaccaaagctatattgtttgctgtctggttcctctttttgtctgatggaatctccgtgcacggcgcaaggagcccttttatataagttgtatatattgtaacgtaatacctaaaatcaataaattcctgttgtattaattagctgctttggaaagagtaaagctataagttcccttattatccttgaagttgtagctacctttaaagcttacgggtaccttaaccaggcaattaccctggtcgcttacacggaaatagagataagaagtcgagctgaatacactgtttccttcagcagtagtagataaggaagctccataaccctgccagttgaacaggtcagtcgaggaagagtatgtagtacctatataaaatactccgccgttattatcaatattaaagttgatggaaacacacaatgcgaattgttctacgaaagcaccgcttctggtacgggcctgatattctgcgatcatcttcacttcttttctgtcaccaccttcgtagtatccttccaaagtttccgattcacagttacggatagtattaccattctgacgaagcgcttcaagcacacttgccatttcttctgcagtcacagaaggtacatcacctactttagagtcaacagttgcagattgtataccatataaagatatcatggattcaaagtttgaagagttgtcttcaaaactatcactttcagcattagaacatgctacaaaagttaatgccaatacacatgcgaaaaagaatttaattgatttcatattagtacctcctaaattttatttgtttttttaatttgtttgcgaactgttgtttgttatttcgtccgcttcttacacttcatattgtttatctgttcatgttccttaggagggaatcttttaaacttaagttgtcttatttatcttttcttgtttgtttgtacactgcaaacataggcgttttattcaatagaaaaaacttttcaggagacaaaatgaatgaattaccactctttaacgaacgaaatacagcttattcaagcacttgaataagatatgcaagtatcaaatcgccactcatctgcaattcattcaatacgagcggtaaaaacaccacccattaccaatgaattatatgccacctacaaaaagaatgatataccaccccacttattaatttccattgaaaggaaagagaagaaagatgaatccaccaattaacgtctattcatataaccgttacttttgcaacatcaacaaacaaaacccatcatgcgatgaaaaagaaaagaatcttatttttgttcgttaccttgtttgcttctaccttattatatagtcaggtagtcggagtgaaaaccaatcttgtaatggacgcgatgaaaattatcaatctcggagccgaagtcggtctgagtaagaagttaacgctggacttgtatgccaactataatccgtggaaatacaaagatcagaagatgatgaagatgctcgccatccagccggaactccgttactggttctgcgacaagttcaatggacactttgtgggattccatgtacatggaggcgtctaccaggctgccgccatcaatatgccctggggcatctggccggaactgaaggaccaccgcttcaaaggcaatttcttcggtgctggtatttcctacggttatcaatggattcttgccaagcattggaatctggaagggaatattggtgtaggttacgcacgtgtcaagtatgagcagttcgaatgcaagacgtgcggtgagaaggttagcgaaggacataagaactatttagatcccacgaaagctgctatcagtttaatctatttattctaaaacaaaacaaatatgaaaaagatattatgcatactcttttgcctgctgcctgtattgggcgggaaagcgcagacactttatagagatcaggtgcgcatagagaaagaatctatcacacgcaatgaagataacaatgtgctgagcatcgatatggatatcgtgatgcaggagaatctgaagctctcctccaatcatgtcgccaccctcactccgttcctcgaatcaaatggccgcaccaagatactaccttccatcgtagtttacggtcgcaaacgtgaagtagtaaaccaacgcaataacatcgctccttcggaaaatacttacagtgttatccgtcgcaagcataataaagaacagattatcaactaccaccagcaattccagttcgaagcctggatgcgtgatgcggaaatgaaactaaatattgatgtatgcggctgctgcgacctgaaagaggagaccagcggtgaattaatcacccgattgaacattttacccgtgcagctacagcccgctatatcctatatcactccacaggcagaagccgtcaagcaccgtgccatagaaggaagcgctttcctcgacttcccggtgaaccaaattatcatccgaccggagtatcgtcgcaacacagtagagctggccaagatacgtgctaccattgacagtgtacgtaatgatgacaagacaacgctcagcagtataaaaattcacggttacgcatcaccggaaggtggatatgccaacaatacccgactggcaaaaggtcgtacacaggcattggtagattatgtgaccagttattacaagttcgacaataaactgatcacttcagagtatacttctgaagattgggaaggattccgcaagtttatcgcagcttcttcattggagaagaaggacgagatactgaaactgatggatgactcgacactggacatagacaagaaagaacgccagatcgctcaattggcaggtcctcaaacttataaatatatattggaagaatgttatccggctttgcgtcattcagactataccgtcaactataccgtacgcgggttcaatctggaagaaaccaaagagattatcaagacacgtccgcaactgttgagcctacaagaaatctatcggattgcgaaaagctgtcagccgggaagcgaagagttcaaccgttcgttccaggtagcagccaccatgttcccggatgaccctattgccaatctgaatgcaggagccatggaaatacagaaaggcggagacctgacaacagcgaagaagcatcttgccaaagctgatcagaaagctcccgaaacgctgaataacctgggagtcatcgcactgctggaaggcgactacgatgcggcagagaaatatttcaatgcagcaaaagccggtggactcaccactcaggctgacaccaatatgaaacaactaaaaagcataagaaattaccccaaagaataataacaaacaattttaccccaaaacacaaacgcaccacctgagaaggcagtgcgttttttttatatcataatcaccatatcatcggcttaacaatctccacttttaagcccaatgcatcaatgatacgaaagaaaagtccgactcccggctcaagcgctcctttctcaattctagatatataggacttgttggtacctaccttgccgtacaatttgtctaatacagcatccatacttccaacgtcagggtttacttacataatattcatttttaagttttactgccttttcaatctcactttcgggcgttttttgtgtctttttctgaaagccattaaacaacatcacgatattgccttcatcaaaaataaaaaaagccccataaatattcatggaatgtttttttattttcaagcgtttcagccctttcagccatccgccacaaccgcctgccagcaggcgaaagcggctgaaagccgcccccgaaaaagcaccctttcagccttcagtcctttcagccgggaatttaccggagcgtcggctgatctctggatgtcccgtagaatccgggaacaggaacatagatcggctgattacgcaatccgagattctgcaactttccttcctggcaaattctccggatatgaatcatagccgtagaacgtaccatgccacacaaagattggaaatctctgcgctgcatcatctgatgcgtactgaaatactccttcagcaacatatcaatctctacttccgaaagtttggacgaatgaaaattcttcttcagttgctttaccttaattaatccgatagagtttttcaatttctgatccgaacgaaagcggatagccttcagtttgattttcatattccgtcgtggagtgtcggcggctatctcttccgtagcagtcagcgtggggtaaaaatagccgatgccgtccaaatgcacctgccgtccttctcccaactcctctcccatcacctgcgaaagagcatccagtacagcagtcacatcgacttcattcagcgtacaacgggattgaatcttactcctcatttcgtccgtatctacctgaccattgtaagcaatgcggggatggaatctttttttcttcggttgatccggtgataccgggttctcataccagtcaaataatatagccatagcttcctcttttattaaataagtacttctaatctgttattcctacggaaacttccgatgaaagaagcttcattttcatcggctaatgtgctatggctgcccggctaatggagattagccgattgactaatgaaggatagctgatcagctaatctgcattagcctctgatgtttgcgccttcaaagatacaacagaaaggcaggaaaacctaatgattcctacgttatttcataaacggaagtatttaaaggaatctatcgaaaacacttgcaaatcgctatcccggcattgtaactttgatgcacgaaacttaaaaaaaagaacaaatatgatggaaaaagtaacccaaatgatcgccatgctgataaaggcatggaaaaaagagagcgtatcacagattgacacacctcccgttcccgcaacgcccgaaccgaagcagcagtcccccaacaactccgcctgcctgacggaacgggtcaacacctttctgcaaactcactatgacttccgctacaaccgcctgacggaagaaacagaatttcgcccattaagcggagcaaagaccgaatttcgtcccatcggaaaacgtgaactgaacaccctctgcatggaggctcatgcagagggcatttcctgctgggataaagatgtgagccgatatatttattccacacaaatcggagagtatcatcctttccggctttatatggacgaacttcctccctgggacggcatcgaccggttgactccgcttgcccgacgtgtatctgcactacctctatgggtaaaaggattccacacatggatgctgggactggctgcccaatgggaaggaaagacgggtgtccataccaacagcctggctcccatcctgatcagtgccgaacagggacggatgaaatcgactttctgcaaatcgctgatgcccaaagtactgcaacgttactatatggataatctcaaactgacatcagaaggacaggcagaacgtcttctgtcagaaatggggctgatcaatctggatgaattcgacaaatatgcagagagtaaaatgccgcttctgaagaatttaatgcaaatgtcgagtctccacgtctgcaaagcgtatcagcgtaacttccgggacttgccgcgcatcgcttctttcatcggaacttccaaccgctccgatctgatgagtgacccgacaggcagccgccgtttcttctgtgtagaagtagaaaagccgataaattgtgagggaatcgagcatgaacagatcttcgcccaactgaaagcggagcttgccgacgggtgtccgtattggttcgacaaagaaacggaacgtgaaatacaacagaataatgcacccttttaccgtacttgccctgccgaagaggtatttctcagttgtttccgcacctcagcctcagcggaagagaaatatctgcgactttctgctgccgatatttataaagaactgaagaaacggaatgctgctgctctacgaggtttcaatccgaaccattttgcgcaagtattgataaaaatgggggtagaacggaagcatacggaatatgggaatgtatatttggtggtaagacgatgaatttcacttgcattatattatcttatataatgtgcctatatcatcaaattttacggattacccatcgaccttctttgcgtcctccttcacgagaaagtatacctttctctgtaagagattctatatcacgtttaatagtccgttctgtcacgtttgtcttttgggacatttcagagatagttatagttccatcagcttgcatgaattcaagtataatctgctgacgttctgttagttctttcgtgacatctttcgtgacatctttcgtgacatacactcgattctcaatatgaaggattagtttcacctgcatcagttccggctgctcaaccaattccggcttcagccaatgcttctcattccacgcactaaggatgagcgggaaacctgagcctaggttttctccgtaacctatcatacggagcatatgctgcattcgttggttacgagctttggattcgccaccagcatagatttgttcaacaggcaatttcaataagcctggattggaaagcacaaagcggtcatcatacttctcgacacgaagaaggccattcagcattaagtcggcatggataatcatattggtaaaagcctcacgcactgccttatgctgtggtgtatcatccttacggataatgccatccatttggaatggccttggaatatctcgcgtcaaacggggaactaccatacgaatgaagttgaacagattattctccccatgtaccgtcataggtcagtcggtcactataacgttggtcacctataaggtttgacttgtcaatatagtccatgcgcagataatcaaaacgctcacgtaccggcaaccctttaccaaacatcagaagacctgctatagtcagaccttcagtaccatcttttcggtttacaacatagccaccaagttgcatcaagaactccttatgatcaagactattccaaatatgttctggattattagtcttgaacataacacgataaccctctaatgtcgggatgtcaatatcatccattgtgtaatactccaagaacatacgatcattgccatcctcgtaagcatcgcgcaccatcatctttatcatttgctctgtgcagtgataatcaccttcatggttgcgtctataagtaccacgcatcaagttgttattaatgtaaacaggacgcaaattataatcggcacgtggtacatttatcgctattacctccttaccattaacgctaatcgtctgaacatcctcatcatgtagcagattcacatttactttctcacgactgttaatagtattccataaatccttgcgtattttgtctgcatcctcaacaccagtgattgtgaatctcatcaaagagtctttctctgctacgttttcatatacccccaacaaaagaattccaccattcgtattagcaaatgcagaatatgtttcccacaaagaatttggcacaccattttgtgcctttttgcattcaagcgtaacacgctcaccatctgcaagcagtttatatatatcttgttctgtcatatcttcattttattataatatatttcaaaagaacaaagataagcaatcgattttaggaaagagtaaatttcagcatattcttattgcattcggaaaaaagagagtgtatcaacgccaaacaacgcagctattgccaagtgcccccttttaccgtacttgccctgccgaagaagtatttctcagttgtttccgcacctcagcctcagcagaagagaaatatctgcgactttctgccgccgatatttataaagaactgaagaaacggaatgctgctgctctacgaggtttcaatccgaaccattttgcacaagtattgataaaaatgggggtagaacggaagcatacggaatatgggaatgtatatttggtggtaagacgatgattgaatttggtaacacggctgaaagcactgaaagcgatatttccagtttttaggatagtactttcagccggaatatcgatgaacaaggaggttcatgataaagctgaacaatctgaaccctaatcggtactgtaattctcaatgtgatgcaaagcagtagtaaatcattcaaaacggaatgaacgaaacacaatttcactaactccccatacattagctgcaaattctattcgctatatctaaaatagttgaagaaaataataaaacaacaacagcggtaaatagaaaacataggcggcaaaacattcatttaaccaaaaaatcattcaaaaaacgatcaattcacccatttcaaaagaccatttaaaagattgaaaaattcaccttcaaaattgaaaaaaacaccaattaacgatttcgcatttctcccatacctttgcaatgtcgataaggaacaaaagtttcttgcgaaacaaacaaaagaacaaaacaataaaattagtatataaacaattaaagaaacattgcctattagaaacaaacaaaatcattcctctcggaagttacttctttttccttatataatataagggcttcctattaaaaagaaaatgatgttttaacaaaacaaacgaccctcatcctttagatgactctcctaaaaaaaagaaaaaacaattagcgtattatacatacatagtataatatgcaaaccctaaaaaaaagaattatagcatcacacattaaaatcaaaactaaaatgaaagtaaagaatttattattagcaggtttggcagtagcagccatgacagcttgtagcaatgacgaaatcattgacaatgatggaatccaaacaaatggtgaaaatgcagcaatgcaaatcaatttccagtttcccacaactagagttgtatcagatggtggcacaaatgcaggtatagatattgagtatgcagctactgaaattacagcagttttagagtacactgaaacaaacaaaagaattgttgtaaaaggattaacctttggtcaacaaactgaaagtggtgctagaatatacagcacagagaaattccaagttgaagcaggaaacaatgtaaaggtttacgcatttattaatcctattatggagataccaacaactggtttggagaatttaaaggttggaaaacaaaaattaccaagtgaaggtttggattatatagctgaaacaatagctaaatctggtaattttatgatgagcaatgttaatggagaacctactgtaataaaagcaattgtaggtggaacagataccaatacagcaaacattagcgttgaacgaatcagtgcaaaattaacagaagagacaaagcgctctatagacaacaaatatgaattaacaactcccactttcgtaggaccaaaggtgtatgtacaaattttgagccatacatacactaatctagctgacgattcttatgtacttggtggtagaaatgcagcatggtcgtcattcttacacccatataaaacaggtgaagtaagtgagactgattacagatggttgaatgcaacaggaacaacatacgtactcgaaaatttaggtagtgaatggaatacagcaactagcaccagcgttctttatcaaggacaagttttcttcgaaaatgacggaaatcaagaaatagcaggaacattctacagcagacctaaattacaaagtgatggtgaaacatggaaagttcaaatttacaagaattgggaagaattatgtgcagatgttgatcttactggtattggagaaaatgacgacgtagctttggctaacagaagtatcatgagatatgcaggaggaaaatgctattatcaagcacctatcgagcattttggtgttggagctaatatcgctcgcaataactggtaccaactaaaagttacttctattgctgatttaggttatccgaaacctgtacctccaactcctgaaaatgaaacgaaattaatgatgagtgttactatagctccttggactatccatatcaataatgttggtctttaatcaactataataaattaatttagggagaagtctcttctccctaaattatactccgaaagaagagagtatcacattcaaacaaaacatccgctctttaaaagcataaaaagtaaaaacaatgaaacgaatcctaactaccatacaagaaaaagcaaataacatattgttattcacaatattggctggtgcaattacatcttgtgattccattttggattacaatgagaattgtgacatcgaatattgtgtcaagttcaagtatgactacaatatggaagaaaaggatgtattcgccgaacaagtaagaactgttactctttacgcttttgacgataataacaatcttgttttccagaacaccgatgaaggtgagccattaggagaagaaacctacgcgatgaacgtagatatagatctctcgcaataccacctggtggtatgggcaggattaaatgatgaatcatttgcagtccctttgctatatcccaatcaagctaaaattgacgaattaagagtaaaaacattacgcaaagaagctactcgcagcaccaccgaggatgaaaagggacaatacatagtagacaacagcctacattcactctggcatggagaggttaaaaaaggaactaccactcgtagcggcagacagcaaatcaccgaagtctcattagtaaaaaataccaatacaatccgtgtcgttgtagcacaagtaaaccaatcaggaggacctgtaacccgcttgacacaaaaaactttcgaatgcgccatatacgacaataatggttacatgaactatgacaacacgctattagaagataacttattgacttacaagccatacaatgtcacatcggatgtagtcagtacccgagcttttagttctgcagatgaacctgccaaacaatacaacggtatcgttagcgaaatgagcgtggcaagacttgtggaaagccaaaagccggagttgacaatcaaaaatactgctactcaggaagtattattccaaagttccgacttggtgaaatacttcgaagaagtagatgccgaaaaatataaagatcgtaattattctcttcaagaatacttagaccgagaagataaatatgaactagtgatttttgtagatgagaaattggcactcatcaaaactgtaatccaagtaaacgactggatcatccaactcaatgatatcgaactttaaaataaagcaaaaaatgaaatactctcatttgacatattatctgctagctatcttatgcatgatggcaacatcgtgtgtctcagacggagtcatgggtgattgtccgatcgataacaacgaccaagcagtactaatagaaggtggcaaagtcaatttcgcattaactttcccgacttcttccacacgaggcataaatggctcatcagaaggtttagcaagcgaacgaacaattaacgatgttcaagtatacactttcgtaggaggaaaattcgttgagaaagtaaagtatattctgataagcggcaccaacggagatgcaacccgctttgtagaaggaaaactgacagagacatatatgacaggaaccgctatggattttgtggtaatggtgaatacggaaagtaagggtgtgcaatctcctaccatgacaaaaggaaacagtaaagctgatttatataaacaattggtttatagttatgaaggcaaaaactggtcaacaaatattccgatgtggggagagggaactattgcatccattcaatcgggagaatataatataggagaacttacattgcaacgtgctattgccaaagtgaatgtaacggtgaatgacggtaaaggattggaaaactttgaaatcaccaatgtaagtttacacaattacaataatggcggatattgtgctccgaccaatgcgaatggtcaaccttctatcccaaccaatgttgttaaagcaacaacacctctgtctgcaggctctctgagcggaacgcaaggcaataatattgagaataaattctatattccagaacataagaacataggtgtagataaagctgaacagctctatttgaagatagaagcaaaagtgaaaggacaaataaaatactatgatattatgttcagtgaaaatggaagtgattatgacgttcttcgtaactatatgtatgtattcaatattactaatgtaaaggtggaagtagatgtcaatcctattttagaatatgaagtaaaaatatgggaagaaaaaactgtgaatattccgtcatttaattaatgcaaggaggataatcagatgaaaaagcaaaacaatatattgaaattaataaaaaatataacatacttgacattagcttgtatagcttttaatgcttgtacagatgaagaaatatataaatcatcagagattgtagagggagttcccgtagaggtcggatttaaattcactataccttccatgcagaaagtcagtactcgcggattaagcgatgaaggagaattccaagtaaacgacctgtatgtcctcatcttcaatgccaacaacgaccaggctagaaaaactggaggagggtactataacagtgatctgattaagaatgttattacaggtaaccaagcaaacgggaaagtttcttccggcacactaacattaaaaacaactagtggagaaagccttatctacgcagtagccaatgtaaaaggtaacgatctaggtggtgatatcactgcagcattagagaacgttaattcattagccgattttaaaaagttgtctgtagcattgacaatcaaagcgaatgtggagcgttcgtcgcccgcacttgtgatgagtggtgcttatatagatggaagcacacaaccacaaactggatattgtaacattccggcacagtcaaccactcttagcggaaagattagcctcacccgtctggactcacatattatcttcaagattactccaaacatgcaagctaatggaggaaagatcaaaacatttactccaaaaagttggagagtatacaatgtgcccaataaatcttatatagtagctcaagacgctgatgcagtcggtaatacagcagaagattacgagaatacagaatcttctattaggtttggagaacaaactgataacatttatgatttcgacttttatatgttagaaaaccgaaagaatgccaaaacttatgaaggtagatcaatcgagaattacaaacaacgtgaagaagaggtcaaaactaatgaacataaaaatacaggagaatataaatatgtagaaccttatgcgacctttgtagagattaaggcgcacatggaaattgaaaatgcagacaatgacaatggtatacgagtagccgacgttacttacgtcattcatttgggatatgttgataatgttgcggctgacttcaaaaatgaaagaaataaaaaatatacatataatgtaactatcaataatgtagaagatattgttacggaagtaacagaggagggaaatccggaaaatactccaggagcagaaggtgatatcgtagactcacagactactgtatataatctagacgctcattatggatatttgattttaaaattcaagtactcagaagtgaaagatggattgcaattctatgtaaaaactccttttggagaaacaaataatgacgacaaatcagtagtaggtcatgattgcaaatggctgcgatttgcacgttgcaataacgaatctacattggcaaattatccaaaagatggaaagggattgattaacttgtttgaattaaaagcagatatcgaagatcaataccagaaagataccaataaagataatacatattattatacagtatttgtagacgaatatttttacgaaaataatccgctagaaacttcctctaataataattgggggaacgaaaattgggaagaatttgttaataaagacgaccgctatgcactactaatctttagtccacaaaaaagtccggatggagaaagtagctatgcaagtgcgaaatatatgatcacacaaaaatctatccaaacctattacagcacagaaaaatttaatagtgacaaaactgcgctaggtatggaacatatagatgaaacaggtgtacctaatggatgggaaagcggaagttacggcagttctcaagaaaatggatataagaatacctatcctgtagttaacaacaccaatataagtagctacggaacagaaactctatcaaatggtaagaatacatttacaataaatgatgcagcaaatgctattcaagcatgcatggcacgtaacagagatgaaaacaatgatggaaaaatcagcggctcagaagtaaaatggttcttgcctgccatcaaccagttagttggaatgttcttaggtgcagaaagcttaccaactccactatttggtgatggtgataagcaacctggaacatatacatataataaaaaagaaataggaacttatggtacttaccactatattagtagtgataagcaaagactgtggtcagaagaaggagccacttttggtcccgctgcaggtatactttatgcaaaagcccccgaaaagcttagatgtgtacgtactttaggaatcagttcccaatataatagtacaagtaaaaaggaaggaaagatatataatatgaataatagttatacattccagatggcttatctagataagcaaagtatacgtacctcatttatagagaatggtgaattagatttacatcacaattttagttcttacaatagaccttatactgcattccaagttgccaataaacgaatgacaattgatgggatagagaccagcaacggatggggaggatcgaataatagaccaagacccacaaactgggaatcacttgtaaaaaacagtggactatctcgtagtgtatgtacaaattactttgagaatgctaataagtctgataaaggttcatggagagcacctaatcaaagagaacttatgattatctatcttcaagatccgagtttggtagaataccaagtcacagatgcttatgattatcgatatggttcttttacaagaacatgttggaaattcaacgaaaatgatcattttactgtagataaggacttaataacaaaaggcactgttggttcatttgttcgttgtgttcgtgacgttaaataaataaaacttaaaagtaaatattatgacaccaaaagacatcctgcaactagaatcatcagatatgcgccaagcctatctgtttgaagagaacgggcgctggtatgcttatgagcattcagccaaccgaatcgaaaaatttgtgaaaggctttgtagacttcaaacacaaagtgcaagatgtctgcggtcggataaaagtagaaatcgacctcagtattttggaaaagtgttccatcacgctgtgtgaagattcgctgcttgtacttgattgccctgcagcataaaaaactgtagaagagtataagcttcataactcgtagtaagaaattacacaatatattgtttgttttgtttgtgttcctcaatccactcagaggcagcttgtgaaagtagcgctgagtgggtggggattttttgtgcaaaaagaaaatgaaaggagaacaaatgatgatgacaaataaaaaaataaagattaatggatgtactcctatagaagacttgatcaccgaagattttggtgctataggaacccccgaaagagatgaattcgagcgaggatgcgaagcctttatcatatgggacgaaaaataagtttcacgatttggtgattttgacaggaaaacatggaaacataagttataattcgcgaaatgtcttcagattgcattgcccataagaaaggcttccaacccgtagaagcctttttaacttgtcaaagtgatagcttcatgtcaatgaagcaaaaatgatagctatatttacaaagcttgttttgtttgtgaacaacaattcaccggaagcataagttatgattcgcaggagttcacatgatttgcatatctgattatttattgcgttctttgtattacataaaatgtataacgtaaaagatgaacgacttcgaggaatacataagacagagcgaaccgcataagcgggagaaaggatacgcttggcaaacagccattggcctgcaagctgttgatggtcttaaaccttcggaatatttgaaggaaaaagcccgccaacacattgaaggggatatcactattgacgaggtcaaacaattagttgatagttattacaaatcaaaggttgcccgttcatctagcgaagatcgtacggaagaagccgataaggtctcagccagaataacagagatcctttcggagaatacattcacattctcacctatcgaatacttggctattcatcggcatttatttgaaggcatattcagccatgccggacaaatacgggattacaatattacaaagaatgaatgggtactgaaaggagcaacagtactttatgccagtgcaggaagtatccgcgaaaccttggaatatgatttctctcaagaaaagatttttgattataaaaatctgaatatagatgaagccatcagacatattgcccgattcgtttctggaatatggcaaatacacgcttttggtgaaggaaatacacgcacaacagccgtattcacgatcaaatatctgcatactttgggattcaatttcagtaacgagaccttcgccaaccattcttggtacttccgcaatgctctcgtcagagctaactataatgacctaaccaaaggtgtgtatgccacgaccgaatttttagaaaaattcttcagaaacctgattctcaacgaacaaaatgaacttaaaaatcgaaatctacagatcgacgaaatcgaaaaggaagccattcaaagtgcaaaaattgcactttagactgcactttggaagagatagccgtacttaactacctcaaagaaaaaccaaatgcaacacaaaaagaaatagcacaacacataggaaaatctgagagaaccgtcaaatccatgaccgtaaacttaagtgaaagaggtattatagaacgcaaaaacggacgtcgtaatggcttttgggagatcaagaaatgaatatcttatgtgagtgattctttgcatatctgattatttattgtgttctttgtattacataaaatgtataacgtaaaacatgtaatagccatgaagcctaataatcctttcctcgtatacggttacaatagtccggattggtcccaaaattatacaagagtaattgtatattgataacacaggtaattgaacagaggcaatctgaaaatgaaaacttttcgaaacatatctactttttatcacattatctttgtttatctcttataaacctgtatatttggagtattataactgatacatttatattaatacagaattactatgagtcataccatcttcctaatcatcgccctcgtcactacaggaatttttcttattcaattcgtattatccattttcttcggagacatagatgcagatgtggacgtggatgctgatatcagcagcgtagtatctttcaaaggtctcacccacttcgggatcggattcggatggtatatgtacctcgtaggaaatgccgatatagcaagttatgcaatcggaattctggtaggtctgttctttgtctttgccgtatggttcctttataagaaagcctatcaactgcagcaagtgaaccggtctgaagagaccgatcaattggtaggacgggaatgtaccatttacttcaagcaaagtgataacaaatatacagtacagacaagccgggacggcgccatgcgcgaagtggacgtgatctccgaaaccggaaaagcatatcagaccggagacaaaacaatcatcagcagctacaaagacggaactttatacattaaataactattcaaatacacaattttatgacacaagaaatgctaatcatggctgctatactagtggcggtcattctgcttacttttatcggcatcctgtcgcgttaccgtaaatgtaagagtgacgaagtcctcgtagtatacggtaaaacagggggagaaaagaaatcagccaagttatatcacggtggggccgctttcgtatggccgatcattcagggctacgaattcctttctatgaaaccattacagatagactgtaaactgacaggtgccctatctgcccaaaatatccgtgtggacgtacccactaccatcaccgtagctatcagcacagacccggaagtgatgcagaatgctgccgaacgtatgctgggactgacaatggatgacaaacagaacctgattacggacgtagtatacggtcagatgcgtctggtgattgcagacatgactatcgaagagctgaactccgaccgtgataaattcttgtctaaagtaaaagacaacatcgacacggaacttcgcaagttcggtttgtatctgatgaacatcaacatcagtgatatccgcgacgctgccaactacatcgtcaacctgggtaaggaagctgaaagcaaggctctgaacgaagcacaagccaacatcgaagaacaggaaaagctgggtgctatcaaaattgccaatcagataaaggaacgtgaaacaaaggttgcggaaacccgcaaagatcaggatatcgccatcgccgaaactaaaaagcaacaggaaatctctgtagcaaatgcggataaggagagaatctctcaggtagcctttgccaacgcagaaaaagaatcgcaagtggccaaagcggaagcggaaaagaatatccgcatcgagcaggcaaacaccgaaaaggaaagccgtgtcgccgaactgaactccgacatggaaatcaaacaggcagaagctgctaagaaagcggctatcggacgtaatgacgcacagaaggaagtggccttatcaaatgccgaattagccgtcacacaggcaaatgccgacaagcaagccggtgaagccgctgcaaaatcggaagctgccgtacaaactgcccgggaaatcgcccaaaaagaagtggaagaagcaaaagcgaagaaagtagaatcttcactgaaagctgaaaagatcgttccggcagagatcgcaagacaggaggctatccttcaggcaaatgccatcgccgaaaagattacccgtgaagcggaagcacgtgcaaaagcgactttggcacaagcggaagcggaagccaaagctatccaactgaaactggaagcggaagcagaaggtaagaagaggtcattgctcgcagaagcagaaggtttcgaggctatggtcagagcagcagaatcgaaccctgccatcgccatccaatacaagatggtagaccaatggaaggaaattgccggagaacaagtgaaggctttcgaacacatgaacctaggcaatatcaccgtattcgacggaggaaacggaggtacaagcaatttcctcagttcactggtgaaaacagtagccccaagtctcggtgtactggataaactgcctatcggcgaaacggtaaagggtatcatcaatccggaaagcaaaacggaagagaaacctaccggaaagccggaggagaaaaaagaagagaagaagaaataaccaataaattatttcatagagattgcctgccttcattttgaaggtaggcatttttttatatctttgcgagcaaaatattaaaaatgaataaccataaacttcaccttctgcctttatttatattgattacggggcttgtcactcttactgccggctgcaaaaagaaagatatgtctctcaaactgaacgaaccccgcaacatccgtggtgtagtcagttacaaacgttctttcccggatttgaatgataaacatctcgccgtggcccaagccgtcggcatctgcccgccggaagacagggacgccgccgaaaagatgaaagaacagcttatccatatcactgacaaccaattttacacagtagactctctgacgcattccatcccctatctggtcccccgcgccagcgaattgctcgacaccatcggctccaattttcttgattcactgacagcaaaagggttgaacccaaatcagattatcgtcacttccgtactacgttcgcagagtgacgtgaagcgtctccgccgtcggaatggaaacgcttccgcaaactccgcccattgctatggcgcaacctttgacgtcagctggaaacgattcaaaaaggtggaagacgaagacggacgacctctgcaggatgtcaatgccgataccttgaagctcgttctgtctgaagtgttgagagacttgcgccaagccgataaatgctacataaaatatgaattaaaacagggatgtttccacatcactgcacgatgagtataaattgcaataaaattcacccgtaaacagccgaagaatccaaaacgtttcactaaatttgcagaaatttttctttaatacgattcaatgatagagaaactgattgttcttgaggatattgacccggttattttttacggcgtaaacaacgccaatatacagttaattaaagctttatatccgaagctacgcatcgttgcccgcggcaatgtcatcaaagtgctgggcgatgaggaggaaatgtgtgccttcgaagaaaatatcaccaaactcgaaaaatactgtgccgaatataattcgctgaaagaggaagtcatcatcgacattataaaagggaatgctccgcaagcggaacagaccggaaacgtaattgttttcagcgttaccggcaagcccattatcccacgaagcgagaaccagctgaaactggtggaaggctttgccaaaaacgatatggtattcgccatcggccccgccggttcgggaaaaacatatactgccatagccctcgccgtccgtgcgctgaaaaacaaagagatcaaaaagattatcctcagccggcccgctgtagaagccggagaaaaactcggtttcctgcccggcgatatgaaagataagatcgatccgtatctgcaaccattatatgatgctctacaggacatgatccccgctgccaagttaaaggaatacatggaattgaacattattcagattgccccgttagcatttatgcgtggacgtacactgaatgacgcagtcgtaatcctggacgaagcgcagaataccactgcacaacaaatcaaaatgttcctcacccgtatgggtatgaataccaaaatgatcgttacgggagatatgactcaaattgacctccccgcctcacaaacttcgggactggtgcaagcactccgcatcctgaaaggggtaaagggaatcagctttgtagaattgaacaaaaaagatattgtacgccataaactggtggaacgcatcgtagatgcttacgaaaaattcgacaaggaggcgaaagccgaaagggagaaacgaaagaatgaacaacaggttatcaacggcgaacgaccggtgaaacaggtcaacaactagtcgtttctgtgatttgtaacttgtaatttgtaattataataaaacaatgaaagcattaacaaaaacagatttcaactttccgggacaaaaaagcgtgtaccacggaaaagtgcgcgatgtgtacaacatcaacggcgaaaaactcgtcatggtagcaaccgaccgtatctcggctttcgatgtggttttacctgaaggtatcccttacaaaggccaaatgctgaatcagattgcagccaaattcctcgatgccactactgacatctgtccgaactggaaaatggctacgccggacccgatggttactgtcggagttttgtgcgaaggctttccggtagaaatgatcgtacgcggctatctgtgcggtagcgcatggcgtacttacaaaagcggcgtccgcgaaatctgcggtgtgaaactgccggatggtatgcgcgaaaacgagaaattcccggaaccgatcgtcaccccgacaacgaaagcggaaatgggactgcacgacgaagatatctctaaggaagaaatcctgaaacaaggactcgctactcccgaagaatatgagactttggagaaatatacactggctctcttcaaacgtggaactgaaatcgctgctgaacgcggtctgatcctcgttgatacaaaatacgaattcggcaagcacaacggtactatctatctgatggacgaaattcatacaccggattcaagccgttatttctactctgacggctatcaggaacgcttcgaaaaaggcgaacctcagaaacagctttctaaggaattcgttcgtgaatggctgatggaaaatggtttccaaggcaaggatggtcagaaagttcctgaaatgactccggctatcgtacagagcatcagcgatcgttacatcgaattgttcgagaatatcaccggtgagaaatttgtgaaagaagataccagcaacatcgctgaacgtatcgaaaagaacgttatgaatttcttgagcaaataagcatggattacccacaacaacatatcaagccttacaacgaagacggtaagaaaaccgagcaggtggaacgtatgttcgataacattgcgcatgcttacgacaaactgaatcataccttatctttaggtatagaccgcagctggcgccgtaaagctattgcctggctccgtcccttccgcccacagcacatcatggatgttgccaccggaacaggagacttcgccatcctcgcttgccgcgaactgaatcctgacgaactgatcggaacggatatttcggaaggcatgatgaacgtgggtcgtgaaaaagtaaagaaggaaggactctcggacaaaatttcttttgcccgggaggactgcacttctctctcctttgccgacaatagatttgacgctatcaccgtagcattcggtatccgcaattttgaagacctggacaaaggcctctccgaaatgtgtcgtgtactgaaaccgggcggacatctggttatcttggaactgactactccggatcgcttccccatgaagcaactgttcgccatctactcgaaagtagttatcccattgcttggcaaactcctctccaaagataacagtgcctaccattatctgccggacactatcaaagtatttccccaaggggaagtcatgaaaggagtcatatcgaaagccggattcggcgaagttcatttccgacggttgacatttggtatctgcacactttatacggcgacaaaataatgaagaatgatgaataattaatttaatcctttcgtgtcatggaaaaatacggtttaatcggctaccccttgcgacattcgttttcaatcggctactttaacgaaaagtttagatccgaaggcatcaatgcggaatatgtgaatttcgagattcccaatatcaatgattttatggaagttattgaagagaatcccaacttgtgcgggctcaatgtcaccatcccctacaaagagcaagtgattccttttctgaacgaactcgatcgggatacagctaaaattggcgctgtaaacgtcattaagattatccgccaaccgaaaggaaaagttaaactggtcggctacaattccgacatcatcggttttacacaatctattcagccgctgctacaacctcagcacaaaaaagcactgatcctcggcaccggaggtgcttccaaagctgtttatcacggactcaagaatctgggtatcgaaagcgtgtttgtatcgcggacacacaagaccgacgatatgctgacttacgaagaactgactccggaaatcatggaggaatacaccgtaatcgtcaactgtactccggtaggaatgtaccccaaagtagatttctgccccaacattccttacgaactgctcactccaaaccatttgctctacgatttgttatataatccaaacgtcactcttttcatgaaaaagggagaagcacaaggtgctgttacgaaaaacggtttggaaatgctacttttacaggcatttgccgcttgggaaatatggcaccgataagataaaggtactgacagccgttttctgatagagttaagaataagggcgtgatattttaattgaggggatttattatgaagaaaagagcagtctacagcattattattatcatgctggtatttaccagttgcacaatcggcgggagtttttatatgttgaacttctccttgacgccgaatgccaaaatattgtctaaagacgccgattcatatccctatatgtacagaaactatcctttcctgcgtccgtgggtggatagcctgaaacaagtgaatgctctgaaagatacattcattatcaatccgcaaggcatacagttacacgctttttacatcgccgcacctgctccaaccagtaaaacggcggtaatcgttcatggatacaccgacaatgctatccgtatgttcatgatcggctatctgtataatcgtgatctgggatataatatcctgcttcccgacttgcaacatcagggagagagcgaaggacgagccatccaaatgggatggaaagacaggatcgatgttttgcaatggatgaacattgcaaatgaaatctttggagacagtactcaaatggtagtacatggtatctcaatgggaggtgccaccacaatgatggtatccggcgaaaagcagcaaccttatgtgaaatgttttgtagaggattgcggctacaccagtgtatgggatgaattttcgcacgaactcaaatcttccttccacctgcctgctttcccgttaatgtacactacaagctggttatgcgagaaaaaatacggatggaacttcaaagaagcttcctcgctaaagcaggtagagaaatgtgagctgcccatgctgtttattcatggagacaaagatacatatgtccccacatggatggtttatccgctctatgaagcaaagccggaacccaaagaactctggatcgtaccgggagcagcccatgccctctcgtacaaagagaataagcaggaatacaccgacaaagtacgggatttcgtcgggcggtatattcattaaacctattataacaaggagttttggaatcataacagaaaaagtttctatatttgcaaatgtaaaatgattgttatgaaatcaatattgacgcttatacttgctacttttctactgattccactgcaagcccaagaaaaggtatatacggtagacaacttgccaaaagtacatctgcaaaataaaatgcagtatgtatgcaatccggcagggatactttcgcaagctgcttgtgacacaatagacactatgctccacgctctggaacaacagacggggattgaaacggtagttgccatagttccttcgattggtgatatggagtgttttgatttttgccatcagctgctcaatcaatggggagtaggcaagaaaggaaaagataacggactcgttatcctgttagtcaccgaccaacgctgcatccagttttacaccggatacggtttggaaggggtacttcccgatgcaatatgcaaacgtatccagactaagtacatgattccatatctgaaagacggcaactggaatgaaggaatggtagccggaatccgggcgacttgccagcgacttgacggatcaatggaaaatgaatcgctttctgaatcgaataatgaatcgatggatttcattttcgctgttatcctgttcgctgtaatcggtgtagggatagcgttctttgccgcaagaaatcagagccgttgccccaaatgcgggaaacatgccctgcaaagaaccggaagcagacttgtatcacgtgtcaatggggtaaagacggaagatgtcacctatacttgcaagaactgcggaaatacaatcatacgtcgtcagcaaagctacgatagcgactatcacaacagagggggtggcggaggcggtccgttcatcggcggatttggaggcggcggcggattcggaggcagtggcggaggctttagcggcggcagcttcggcggaggaatgggcggcggtggagccggttcacgattctgatccctacagataatattaaataatcaaatactcatcaaaaagtaagaaacatgaaaaagtcaattatcatcattttagccgttgtggctatccttgtcatatgggcagtcagtgtatataacggtcttgtcaccatggatgagaatgttagcggacaatgggccaatgtagaaacccaataccaacgtcgcgcagacctgatacccaatcttgtaaacaccgtaaagggatatgcttctcatgaaaaagagacattggaaggagtggtagaagcacgtagcaaagccacacagatcaaagtggatgccgaaggtctgactccggaaaagctggcagaatatcaaaaagcacagggtgctgtaacgtctgcacttggcaaattattggctatcacagagaattatcctgacttgaaagccaatcagaatttccttgaattacaggcacagctggaaggtaccgaaaaccgtatcaatgtagcccgtaaaaacttcaatgatgcggcacaatcgtacaacaccaatatccgccgtttcccgaaaaacatatttgcagggatgttcggattcgacaagaaagcatactttgaagcggaagaaggaagcgaaaaagctccgaaagtagagttctaaaggatgatttcttaaagaacttccaggctaaaatcggaatcgccgttacctgatttattcagataacggcgattccagctcttaaccaccacgaaaggacttccataaaagagcgttaaaaaggaacttttgctcctgtctctttaacggtttaactagtctctttccactatcaatcagcataatgattaaaataatacgaaccattaattaacacttttatgttttattcttcttccggacgaagcttgataaacaaatagttggctgtacgaaaaaaaagcagtacttttgcagccgtatacaaaaaataattctttaactcatgagtaatcaacgatacatgatgcggggcgtaagcgcatcaaaagaagatgtgcacaacgccatcaagaacatcgacaaaggaattttcccaaaagcattctgcaaaattattcccgatatactgggtggggacccggaatattgcaacatcatgcacgccgacggcgccggaaccaaatcttcccttgcttatatgtactggaaagaaacaggcgatttgtctgtgtggaaaggtattgcacaggacgcattgattatgaatatcgacgaccttctttgtgtaggcgctgtagacaatatcctcgtttcttcaactatcggacgcaataaactgttgattcccggcgaagtaatctccgctatcatcaacggaacagacgaattgctggctgaactccgtgaaatgggtgtaggcgtatatgctaccggtggcgagactgctgatgtcggcgacttggttcgtactattatcgtagactctaccgtaacctgccgcatgaaacgctcggacgttattaacaatgccaatatccgtccgggagatgtcattgtaggccttgcttcttacggacaggctacctatgaaaaagaatataacggaggtatgggcagcaacggtctgacaagtgcccgccacgacgttttcggcaaatacctcgcagagaaatatccggaaagctatgatgccgccgtacctgaagaactggtttactccggaggattaaaactgacagatactgtagaggattctccaattgacgcaggtaaactggtactctctcctacccgcacctatgctccggtagtgaaaaagctacttgacaccttacgtccggaaatccacggtatggttcattgctccggtggtgcgcaaaccaaagtgctgcatttcgtagaaaatgtccgtgtagtaaaagacaatcttttccctgttcctcctctgttcaagactattcaggaacaaagcggtacagactgggcggaaatgtacaaggtattcaatatgggacaccgtcttgaagtttacctgtcaccggaacatgcagaagaagtgatcgctatttccgaatcattcggcattcctgcacagatagtaggacgtatcgaagcgtgtgaccagactgaattaatcattaaaagcgagttcggagaattcagatattaaagaatggcagataacagtaccatattagaaaaactagacggacttgtagcccgttttgaagaaatatctaccctcatcaccgatccggcagtaattgccgaccagaaacgttatgtcaaactgaccaaagaatacaaggatctggatgacttgatgaaagcccgcaaagaatatatccaactgttaggcaacatcgaggaagccaaaaacatcctttcgaatgagtcggacgctgacatgcgtgaaatggcaaaagaggagatggacaacagtcaggaacgtcttccggcattagaagaagaaatcaaactaatgctcgttcctgccgatccgcaagacagcaagaacgccatcctcgaaatccgtggtggtgcaggaggagacgaagccgcaatctttgccggcgaccttttccgtatgtatgccaagttctgtgaaaccaaaggctggaaaatggaagtatccaatgcaaatgaaggaacagccggaggatacaaagaaattgtttgcagcgtcacaggagataatgtctacggaatattgaaatatgaatcgggtgtacaccgcgtacaacgtgttcctgccacagagacacaaggacgtgtgcatacttccgccgcttcggtggccgtactccccgaagccgaagaatttgacgtagtcatcaatgaaggagaaatcaaatgggataccttccgaagtggcggtgcaggcggacagaacgttaataaggtagaatccggtgtacgcttgcgttatatctggaagaacccgaatacaggcgttgcagaagaaatcctgattgaatgtacagaaacccgtgaccaaccgaagaacaaggaacgcgccctggcacgactccgtacctttatctacgacaaggaacatcagaagtacatagacgacatagcttccaaacgtaagacaatggtatctaccggcgaccgatcggctaaaatccggacatacaactaccctcaaggacgtatcaccgatcatcgtatcaactataccatctataatcttgccgcttttatggacggagatattcaagattgtatcgatcacctgatcgtggcagaaaatgcggaacgcctgaaagaaagtgaactctaaaaattatagtatagacatgaataaacaacagctatttgaaaacataaaacgcaagaaatcattcctttgcgtagggcttgataccgacatcaagaagattcccgaacacctgttgaaagaagaagatccgatcttcgcattcaacaaagcgattatcgacgcaacagccgatctgtgtatcgcttacaaacctaatctcgctttttacgaaagtatgggcgtgaagggctggatcgcatttgagaaaacagtaaaatacatcaaggaaaactatcccgaccagtttattattgccgacgccaaacgtggcgacatcggaaacacttctgccatgtatgcccgtactttcttcgaagaactggatatagattccgtcactgtagctccttatatgggtgaagacagcgtaactccattccttacttacgaaggcaaatgggtgattttgctggcactgacttccaataaaggttcccacgacttccagttgacagaagatgcaaacggcgaacgtctcttcgaaaaagtactacgcaaatcacaggaatgggcaaatgacgaacgtatgatgtacgtagtcggcgctactcaaggacgtgcttttgaagatattcgtaagattgttcccaaccacttcctgctcgttcccggtgtcggagcgcaaggcggttcgctcgaagaagtttgcaaatatggaatgaacagtacctgtggcttaattgttaactcttcccgtggaatcatctacgtcgataaaacagaaaagtttgccgaagctgcaaggcttgccgcccaagaagtacaggcgcaaatggcagagcaactgaaagcgattctttaaagagaaggaatgccttacgaaagaaagataatcaacgatccggtattcggattcattaatatcccaaaggggttactgtacgatattgtacagcatccccttttgcagcgtcttacccgcatcaagcaagtaggactctcgtcagtagtataccccggcgcgcaacatacccgtttccagcactcactaggtgcgttctacctaatgagcgaagctatcacccaactgacctccaaaggtaactttatatttgacagcgaagctgaagccgtacaagcggctatcttactgcatgacatcggacatggtcctttttcgcatgtgcttgaagatacgattgtacaaggagtttctcacgaagaaatctcccttatgctgatggaacgaatgaataaagagatgaacgggcaacttagtcttgccatacagatctttaaggacgaatatccgaaacgattcctgcatcagctcgtcagtggtcagttggatatggaccgcctcgattatcttcgtcgtgacagtttctataccggtgttacagaagggaatatcggttctgcccgcatcatcaagatgcttgatgtggccgacgaccgtctcgtaattgaatccaaaggtatctactctatcgaaaatttcctgacagcacgtcgcctgatgtattggcaggtatatctgcacaagacatcggtagcctatgaacgaatgcttatcagcacgttgcttcgtgccaaagaactggcatcacagggagtagaactgtttgcttcgccggccttacatttctttctatataatgacattaatcatacggagttccataacaatcccgattgtctggaaaatttcatccaattggatgacaatgatatctggactgccttgaaagtatggagcaaccatccggataaagttctttccacacttagtctgggcatgattaaccgaaatatctttaaagtggaaaattctgccgaacctattggtgaggacagaataaaagagttaactttgcaaatcagccagcaactaggcataaccctttccgaagcgaactattttgtctctacccccagcatcgaaaagaatatgtacgacccggcagatgacagtattgatattatctacaaagacggcactatcaaaaatattgccgaagcatcggacatgctgaacatctcattattgtccaaaaaggtaaagaaatactatctctgctaccagcgattgcatagataagtataaaatattcattcaataacacggaaatctgaaaaaaaaatccgttatttgtgaactaatttaatttaaaataaagacatggagttctcggctaagcaaattgcagcatttatccaaggggaaatcattggagatgaaaacgcaacggtacacacattcgctaaaatagaagagggaatgcccggagctatttctttcctgtcgaaccctaaatatacgccttatatctacgagacacaatcaagcattgtattagttaataaagattttgtccctgaacatgagattcaagctactctgataaaagtagacaatgcttatgaaagcctggcgaagctgcttaacctctatgaaatgagtaaaccaaagaagcaaggtatcgattcactggcttatattgcccccagcgccaaaattggcgagaacgtatacatcggtgcctttgcctatatcggcgaaaacgccgttatcggagataatactcaaatttacccgcatactttcgttggagacggtgtgaagataggcaacggttgtcttctttactcaaatgtaaatgtttatcatgactgccgtgtcggtaatgaatgtatccttcactcaggtgcagtgatcggagccgatggattcggttttgctcccactccgaacggatacgataagattccacaaatcggaattgtgatcttggaagacaaagtagatataggtgccaatacctgtgtagaccgtgctacaatgggagctaccatcatacatagtggcgctaaaatagataatcttgtgcagattgcgcacaacgatgaaattggctcacacacagttatggcggctcaagtcggcatagcaggctctgccaaaatcggagaatggtgtatgtttggcggtcaggtaggtattgccggacatatcacaatcggcgaccgggtaaatctgggagcacaatcaggtataccaagcagcatcaaagcagacagcgtactgatcgggactcctcctatggaaccgaaagcttacttcaaggctgctgttgtgactaagaatttgccggatatgcaaaaagaaatacgcaatctgcgtaaagaagtagaagaattaaaacaactattaaataagtaaataagtaaccaatgctgaaacaaaaaacgctgaaagatagcttttcactgagcgggaaaggtcttcacactggacttgatctcactgtaacttttaatcctgccccggacaatcatggatataaaatccagcgtattgacctggaaggacaaccaactatcgatgcagtagccgacaatgtgacggaaacaacccgtggcacagtattgtcaaagaatggagtcaaagtaagtaccgtagagcatggtatggcagccctttatgcattgggcattgataactgccttatccaggttaatggtccggaatttccgattttggacggtagtgcacaatattatgtacaagaaatagaacgtgtaggaacagaagaacaaagtgctgtcaaggatttttatatcatcaaatctaaaattgaattccgggacgaatcaactggttcttctatcatcgtgctaccggacgagaattttagtctgaatgtactcgtttcctacgattcaaccattatcccgaatcagtttgcaacacttgaagatatgcacaatttcaaagacgaagtggctgccagccgtactttcgtctttgttcgtgaaatagagccgcttctctccgccggcctcatcaaaggtggtgacctcgacaacgcaatcgttatttacgaacgcaaaatgtcacaggaaagctatgacaaactggctgatgtaatgggtgttcctcacatggatgcggatcagttggggtacatcaatcacaaaccactggtttggccgaatgagtgtgcccgtcacaaactgctggacgttatcggtgatcttgcattgattggtaaaccgattaaaggtcgcatcattgctacccgccccggtcacaccatcaacaataagtttgcgcgtcagatgcggaaagaaattcgcctgcatgaaatacaggcaccgacatacgactgtaaccgcgaaccggtgatggacgtaaatcgtatccgtgagctattaccacaccgttatcctttccaattggtagacaaggtaattgagatgggtgccagctatatcgtaggtatcaaaaatatcacagcaaacgaacctttcttccagggacatttcccacaggaaccagtgatgccgggcgtacttcaaatagaagcaatggctcaggtaggcggtttgctcgttcttaattctgttgacgaaccggaacgttattctacctatttcatgaagatagatggcgtaaagttccgccagaaagtagtaccgggagatacactgcttttccgtgtagaattattagccccgatccgtcgtggcatctccacaatgaaaggttatgcattcgttggcgaaaaagtcgtttgcgaagcagaattcatggcacaaatagtaaaaaataaataaaaccaaaaacatggtaagtcctctagcgtatattcatcccgaagctaaaatcggagaaaatgtagaaattgcgccttttgtatttattgataaaaacgtagttattggcgataacaacaagattatggctaatgtgaacatcctgtatggttcacgcattggtaatggaaatacgatctttccgggtgctgttatcggagcagttccacaggacctcaagtttcgtggagaagaatcaactgctgagatcggagacaataatctgattcgtgagaatgttacagtcaaccgtggtacggcagctaaagggcgtaccattgtaggaagcaacaacttattaatggaaggggtgcatgtagcacacgatgcactgatcggtaacggatgtattatcggcaactctaccaagatggcaggtgaaatcgttattgacgacaatgctattatcagtgccaatgtattaatgcatcagttctgccatgtaggcagccatgtaatgattcagggcggatgccgcttcagtaaagatatccctccttatatcattgcaggacgtgagcccatagctttcagcggtatcaacattatcggccttcgtcgccgtggttttgccaatgaagtaatcgaaagtattcataacgcttaccgtatcatttaccaaagcggtctgaatacaacagatgcattgaagaaaattgaagatgaagttgagaagagtccggagattgactacatcatcaatttcatccgtaattcagaacgtggtattattaaataaacagttcaaaatagtcatattatgatatacagatttactatcatatctgatgaagttgacgattttgtcagagaaatacaaattgatccggaagctacatttcttgacttccatgaagcaatactgaaatcagtagggtacacaaacgaccagatgacctccttctttatctgcgatgatgattgggaaaaagaaaaagaagtcactttggaagaaatggacgacaatccggaaatggatagttggataatgaaagagactactatcagcgaactggtagaagatgaaaagcaaaaattgttgtatgtattcgactacatgacagagcgttgcttcttcatcgaattgtctgaaatcatcaccggaaaagatatgaatggtgccaaatgtaccaagaaatcgggtgatgctccgccacaaactgtagattttgaagaaatggctgctgcaagcggttcactcgacctggacgaaaatttctatggtgatcaggactttgatatggaagattttgatcaggaaggcttcgacataggtggtaacgcgggtggctcttatgaagaagagaagttttaagtattaagtatcaagtattaggtattaattgctatgcagtgacaagcagttaatacctaatatttttatcccctggcactttaatacttaacacctaatacttaatacttaaaatccatgcccactctcattgttttaatcggacctacaggagtaggaaaaacagaattaagcctgcgactggcagagaactttcacaccagcattgtctctgctgattcgagacaactttatgctgaattaaaaataggaacagcggctcctaccccggatcaattaaaacgcgtgcctcactatttggtaggtactcttcatcttaccgattattacagcgccgctcaatatgagcaggaagcgatggaaatcctccatcaattattcacagaacatgaggtagtagtacttacgggtggatcaatgatgtatgtagatgccatctgcaaggggattgacgacatccctaccgttgatgctgaaacacgtcaggtgatgctgcaaaagtatgaggaagagggattggaacaactttgtgcagagctccgtttattagatccggactactatcgcatcgtagacctgaaaaacccaaaacgggtgattcatgcattggaaatctgttacatgaccggaaagacatatacttcttttcgcacccaacagaaaaaggaacgccctttccgcattcttaagatcggattaacccgtgacagagaagaactgtatgaccgcattaatcgtcgtgtagaccaaatgatggaggaaggattactggacgaagtacgttccgtactctcctaccggcatctaaactctcttaataccgtaggttacaaagaactgttcaaatatctggacggagaatgggaactccctttcgctatcgaaaagatcaagcaaaattcacgcatttattcacgcaaacagatgacatggttcaaaagggatgaagaaatacgctggtttcatccggaacaagaaacggagatacttgagtacctccgtctacaaaatctgactcatttgcccagtttggataccttctgataaacttcccgatagacattattgcccaaccggaacagaagcgtcattttctttccgtcaatccggtaagatataggaacgatagcatttgccgatctgccatgttcattacgcagtttctcgcagtaaaggccttttgcaatgatgctgtactcccccgaacgggtaattttgtacgggcaaaatacatcgtccgaactgcggctgcctgaactcacgtctacagcatttttgatatacgcatccacattgaaataattgccttctttatcaagtaccttatatctgaccacttgcgaagagccttcactctgaacaagtttccagattccttttaagttttgactcatacaaaatgcaggcacaagaaaaagaaatgaaacagctagtaaaatcttacaaaattgtcttttcataataataaaattttaagtttaacaaatagttaataatagtgtatatcgcttttattccatatttttatttcaacaggatataactgcccatttttaatcaaataaagtatcctctcatttatctttcaaaactactttaagcataggttttactttcacttcagcaacagacttattgacatcagcaatccgaagtatcccatttttaggcgctttcaatttaaaacgaccatctgcatcagctacagtataatcatttgttccctttactaacacagtagccgcaatcgtttttccttcttcatcagtcacaactccagttacagaaatccaatcagaacgatatttatcggtttccaatcttacaatctttgttccatccatttcatttacagacaccgatcttatatttttggtagacatacctttcaatttagacttcttaatcttttcatcgtctatacaataaataatttctccttctacatcttttgccatgctttctgccaattccaaagcatctgcataaggctttttcggattagctttattaaactcatattccgcatctgtaaacaaagtgataatcagcaccccatttttccctctttccccataaatatccgtagctgatttatctttcaatatagtaaagtttttgatacgatcaggagcaagtttggagatagcatcttcttccaatgcttctttaccgtcaataataaccaaaggcttttttttagcttgagcaacatgccattcctcatcatgagatccccccatataaaagtgtgattttttaggtgattcgctctcagtccttacctttgcaggttttggaaatttttgtttattctgatattcttcttccgtcaacaaatcaactaaaactactccatctttccccctctctccataaacctctacagctgctttgtctttcattacagatatacttttaatacgttccggagagacactggataaagcttcttcgccaacggcttctttgccatctatataaactaacggcttcttaccacttactgaatgaaacgttacaccccaattcttacttccacgattgagagcatctaatctcgtttttgaaatagcatcaatcttgtacttattctgcaatatttgttctgcggttgaatgtaactgaataaccatagccccgtttttcgctttatctccataaatatctgtagcctcttttccatctaatatagaaatactttcaatacgacttggatctaaagcatctaccacagtacgagaagattctttaccatcaatgatcaccaatacatctttatctcgcaaatccaccgtagatatcccccaaatatgggtacccataagtttcgatttatctacagatgtattcattcccggctttatttttgcttgagttttggttattttaaaatgattatcttcatccggcagtagtttagtagccaacaccccattctttcctttttctccataaatagatattgttcccttctccttcaatattgaatcacccgtgactaccaactttttcagtgaatctccaaaagtaatattcgacacatctttggtgatttcttccacttttgcttctacaattgcagccaaatcattaactttgacggcagaaatctcttcaactctttcagagatttcgggacgggcaaaagcggttactgcaatagctgccaacggaagtacatacaagtacttcaaacgtgcccaaggattcgatttttcttttaacatcatagtgatacgttttttaagtttactgtgattaaagctgttggccatagagtagagccttgtgccaacggctttttttattaataataactgataatcttttgcatcaataccttcattaataactgtttcatcggcttcatattcatgaatattctgtaattcctgtttcagcagccatatgccggggttgaaccattgaaaaaagatacagatatcagctaccaacaaatcgatggaatgacgattctgaatatgtgccatttcatgaatcagaatctcgcgtccatcctcttccaaatctttccgggaaataacgatatatctcatccaactgaaaggagcgacctcccgttccagaacaatcagtctgactcctccttcaagcctttcttgtttacccgatttaatcagtaatagtaaacgggataaagagtaaagattacggcatgcaaagaatataataccaactagataaaacagcaacagaacttgtacccaggaaatggaaagttcctccggctgtgcaaccgtcacctccgcgggatccatagcttccgccatcatcaatagttgctcaactgtcagtacggtctgactcaattcggtctgatgagcagtagtcacctctataaagggaatcagcagggataaaaataatatccctaataaggctatcctattgaaccgatggaatgtttccttacttaacaacaatctgtaaaacagataaaataaagacagacaaaccgccgatttcaaaatatagataagaaagattcccatagtcattgatatttaaaggagacaaatatagttttaacccggattagtataaataataaggacgctgaatgaccattttataagtatattgattcctaagttatttatccaatacgatttttatgtcttttgcagcttttgtcctgaaaagaaccttctcaccccgagaaatctggagagaggcgtctttaggagttctcaactcaaagtgtccagttgcatcagtctttgtagacgatgaagttccatacatagtaatagtgactccttccataggctttccttccttatccattacaatacccgaagctaatacccacttatccgaatttctttccgtttcaacacggatcgtagttttaccctccccgctattctcaatacgtgatactccacgtacttcatttgccggaatatttttcaattcttcttccgaggcttccttaccatcaataaagaataccatcttccttgtagggacggttttatcaccttttatattcatcgctacctcccaggcattgttatagggacgttgcggattcttattgcgagcttcatattcctcctcagaaagcaagtctatcaaaatcactccattcttcgccttcttaccataagcctccaaagcagcctctgatttcaagacagaaaagctttttatacgatccggagaaatcttagacaaagcattaggttccaaaacttctttaccgtcaatcactactaatggttcctcaccatcatatacaccacgcatgggaagtccgccaatgccggggacagagttctgtttaggaaatgattcggttttagtcttaaatttagcctgagttttagtaattcgaaagtggttatccgcattcggcagtaattcaatatcataaacaccatgttttcctttctcgccatagatagaaagggccgcatcactacgtaatatagacacagtctttattcgattcgggttagcttcatcattcattatcgaatacaatgtatctttagatatttccttaccatctaccaatataagaggcttatttgattccgatatccgttcaaaacggccaccatataaaacaaccgaacttcgcttggaagcaacggaatcattgaatattacaactgaatctgctgaatatacagtcgatgaatccttagaaacccaacgtcctccatacatttttgatttctcaggcactacatagggcttagctttcagggaatctttcagcacatctttggtgatttcttccacttttgcttctacaattgcagccaaatcattaactttgacggcagaaatctcatcagccttttcagagatttcgggacgggcaaaagcggttactgcaatagctgccaacggaagtacatataagtacttcaaacgtgcccaaggattcgatttttcttttaacatcatagtgatacgttttttaagtttactgtgattaaagctgttggccatagagtagagccttgtgccaacggctttttttattaataataattgataatctctagcgtttataccctcattaatgaccgcttcgtcggcttcgtattcatggatattctgcaattcctgtttcaataaccacgctccaggattaaaccactgaaagaatatacagatatctgctatgagcaagtcccaagaatggtgctttctgatatgcgcacattcgtgaatcagtatttcacgtccgttctcctccaaatcagttcgtgaaatcacaacaaacttcatccaactgaagggtgccacattccggtcatgaaccaacaaaacagtatgtttatctatctgtctccgttgcgccgtattcattaaccgaacaagacggaataaagaatagacattccggcaaacaaggaaaaatatgcccgctatataaaatagaagaactatttctatccaatgcactgggcttctccacgtatctaccaaatcatctccttccactactgttgtcacctgggtttcctgatgattctctgccataacaagtagttgttcaattgtcagtactgcctgatttatttcattctgcggcgccttggtcacttcaatcagcggaagcaacaaagaaaacacgagaatgcccaacaacgcaatccggttaaaacggtagaacgtttctttactcaacagcagcctgtaaaacaaataaaacaatgacaggcacacccccgattttagtatatagacgaaaaagaatcccatatatagattaattccagttagttctctgccaatttcttctcaaactcctccaaataggaaggattctttttagatgccaacacccaaatgcctttcttggctttactaccaaacttagattccagattcgtcgactccggcaaaatttcccatacatcatgcaacagatcatccggagataagctcttcaactgctggtaagaaatttcttttccatccaaaagaataagctgtccatcatgcccggttcctccatccgtacaataaatcttaaagaaatccttcacataataaatgcacttcacagtatgagaggtcttcacttcatgagcaagtgcaggatgagcgttctgctgctttttaactccatagagttcattcaacgatttaagcattcctttttttacccgatgaacaaaatccgccaagtcactttctgtccacggagtagtggaagacaaacgtagtattcctttctccttttggtaaacacctttccgataactgatgacattatcatcagaacttgattccgaaattgaccatcctgcatatcccacagggatatgcatttttagagtatcgatttctataatttgtacagtgtccgattctgcataactcttagaaaccagaatctcttcgaaatgtctcacatccaatgtatcctgtatgaatgcatttccctcctgattattcatattcagaagattcggacgggcaaaaagaacagctgtaatagctgccaacggaaatactatcaagtattttgataatttccaaggatttgattttttcttcaacatcatagtaatacgttttttaagtgaactgtgatcaaaactattcaccatagaatacagccttgttccaacagtcttttgaattaataaaagctgatatttctttgcatcaatccctgctttcagaactgattcatctgcttcaaactcatgtacagttttcaattcttttctgaatagccacattgcaggattaaaccactggaacaaaaggcaaatctccgccaataataggtcccggaaatgtttgtgcatgatatgcgcatactcatgagctataatttcttcgccatactcctccaagtcctgccgggatagcacaatatagtgtctccaactaaacggtgccacattttgctgatggaccaccaatctgatttttcctttccaacacttcttctcactgttacgaatcaaacggtatatacatgctatggaaaatatgtaacgcaacaataacagcaatgctccacccagatacagaaatcccaaattgccaagggtcaaaatagtgaaatcagacctttctttctctaattgtgtatgtaacgtagttgttgtgacctgctccattttctgcaaatcatgttcttgctccgtttcttcttccggaatattcagacgttcaaacacttgctcaatctgtggtaaatggaagttctgtgaaactttgagcgaaggaatgacaaatgcaaccaatataagcccgatcaacaccatccggttgaatcgatgaaatgtctccttgcctagccacaagcggtagaataaataaaaaacagacagacaaagcgctgttttcaacatatatatgaggaagaaaatgtgcatagtattgttttgtattagattgtgttattctttattatttctgatgagcttgttccacctcgtttataagccttttcaagtcatccaaagaaatatcctcctctttgaccagagatgaaacagcgctcaaatatgaattattgaaatacttgctgattacattccgcaatgtccctttacgaaaatcttcttcgctgacaacgggatagtactgataagtattcccaaaagtatgatgagccaggaatcccttatcttcaagcccgcgaacaattgtagataacgtattgaaatgaggcttcggttcctcatagaaagccaacatttctttcacaaacaaagggcctttctcccagaaataccccatcaattcctcttcttttactgttaatcctttcatatttacaacattgtttactgcaaataacgagaagttttagttcataaactaattttcatagttaaagtaaactaaatgctttagtttatcttcttttctaacaattgcggcaaggtatacctatttacatattggcattaaactcagattctatcgggatttatccatccattcccccagcctctcagaaaagaattatgtttttatctctcatactctcattcttttcttataaatatcagagaactaacaagatacaaaatgagagatactttcatcatcggtatctctcattctatttcaacttatctctcatgatttttcggacagtataccgttatcttaccttcatccggctgtcctttacagatgatactacctatcttcttagcatctcttacctacatccttatcttatctcccttacatacctctgttttcttaccgacatcttcatcgttccactagagtgcacaggcctgtgcactctagtgaacagatcgtgccacccgggtgaaacgatctgttcacccgagtggcacgataacaattgaacttatatcacacgaccttatccgatagataacacaagaatatagggttgtttatctgaaaagtaaggctacatctcccttattatcccagtaatttatcaatgataaaatggccgatgaagaataaatcgcccatgaaaacaatgctgaatatcagaaaagcaaagcaggtactccaacgggaacctcctgcttcctcgccacgtttaatacggagcagggaactgtgcagacaatcacccgcaatgaacagcacaaacagactcggtatcaagtcaccccatgatatcaaccacaggttatcaccttttcccatcaggaatgtcaatgctacggccaacaggaagacagaagcatactgcaaatcttttctcttcgaattcatagcggtaatatttaaagtacttttcacaaagatatcgaatatcttccaataatccttatcaattctatctaaaaaaggttatgcctgatcggaagattcggacggagcattccctgccttagcggatttctttttcagccgaccgctctttctcagcgcttcggcaataatccactgaagttgtccgttggtactgcgaaactcatcggctgcccatttttcgatggcatccattgtctcggcatctacacgcaaaacaaaactctttattgaagattcttttttagccactaccttcttaccttctgtttttatttattaatgattcaacgtacctgtattgactaccggctgtgcagcctcatccgcacaaagaactacaagcagattgctgaccatcgccgccttcttgtcctcgtccaattcaacaatttcttcttcagaaagtttatgcaaagccatacgtaccattgatacggcaccctccacaatcttttcacgggcactgataatggccgaagcctgctgacgacgcaacatgacggctgcaatctccggagcataagccagatagttaatacgggcttccactatttccattccggccatcgccagacgttcgttaagctggtgttccaactgatcattaatttcatcgccaccgctccgcaatgtcaattcatccgaattcgcttcgttatcatcgtaagcatacaatcctgccacctgacggagagcagcgtcactctgcacacgcacaaaatcttcaaaagcattcattcgtccggcaacggttacgctcatctgtccggttcctttattatccgccatcgtctgtgcatcgatttcgaacatggccttatacgtatccttcagtttccagacaagcaccagtcctatcagaatggggttaccaatcttatcattcaccttgataggttctatatccagattacgggcacgcaaagagagctttttcttattcataaaaggattcacccaaaagaaaccggtttcggtaaaggtacccttgtactttccgaagaataccatagcccgggcttcgttcggttcctgagaaaaatatccgggaatcatcagaatagctgctgcaagaaagaggatcaacagcaggaacaaaacaatacttcctttaaaaaggataaagctcatcacaatcagaagaggcagtatcgccaaattaacaaacaaggctacaaacccattaataaccacgtcattgtactgaaattcttttgcattcataggactaaattttgatattattttgatatcacaaatatatcacttttcattctgataatgcaaggggaaagactcttttttctccgcaatacatcatttttaactaaacagcagtcatccgatactaaacaaatttaaaaggcgtaagaaaataagggtttaattcaaacaaaaacaggatgtactttgaggtatttaagtttattgttatttttgcagggtatgaacttaacccccttaaacaagtaaaatataaaacgatttataaaatgagaaaagtaagtttagccctgctcctctgccttctctgcctcgccggaatggcacaaggacaaaaggcacttgatttaaaagatattacctccggacgcttccgcccggaaaatattcagggagtcatccccacaccagatggagagcactacacacaaatgaacgccgatggtacgcaaatcatcaaatactcattccgcacaggagaaaaggtagaggtgatctttgacgtgaaccaggcacgcgaatgtgacttcaagaatttcgacagctatcagttctcacccgatggtgacaaattactgatcgctaccaaaacgaccccgatataccggcattcatacacagctgtgcattatatataccctttgaaacgaaatgataagggagttacgacaaacaacattattgaacggctgtccgacggcggacctcaacaggtccccgtcttttctccagacggaacgatgatcgctttcgtgcgtgacaataatatatttctcgtaaagctgctctacggtaacagcgaaagccaggtgaccgaagatggcaagcaaaatatggttctcaacggtatccccgactgggtatatgaggaagagttcggtttcaaccgcgccctggagttcagtgccgataataccatgattgctttcatccgcttcgacgagtcggaagttccttcctattcttttccgatgttcgcgggagaagcaccgcagattactcctttgaaagattatccgggagaatacacctacaagtatccgaaagccggatacccgaactcgaaagtagaagtacgtacgtacgacatcaaatcgcacgtgacccgcaccatgaagcttccgatagatgcagacggatatatcccccgcatccgcttcacgaaagatgccagcaaacttgccgttatgacattgaaccgccatcaggatcgtttcgacctttattttgccgatccgcgctcaacgctctgcaagttagtgttgcgtgatgagtcaccttattatattaaggagaacgtgttcgataatatcaagttctatccggaaactttcagtttgcttagcgaacgtgacggtttcagccatctttactggtacagcatggggggaaaccttatcaagaaagtaaccaatggcaaatatgaagtgaaggattttctgggttatgacgcaacagacggctctttctattataccagcaatgaggaaagccccttgcgtaaagcagtctacaagattgataagaaaggcaaaaagacaaagttgtctcaacgtgaaggaaccaatacgccgttattcagcaaatcgatgaagtattatatgaacaaattctcgaatctggatactcctatgctagttacgctgaatgacaacacaggcaaaaccttaaaaacgcttatcaccaacgaccagttgaaacaaacgttagccggctatgctatcccgcaaaaagagttctttaccttccagactacggacggggtaactttgaatggatggatgatgaagcctgtcaacttctccgcatccaagaaatatccggtgctgatgtaccagtatagcggtccggggtcacaacaagttctggatacttggggaatcagctgggagacttacatggccagcctcggctatatcgttgtatgtgtagacggtcgtggtacaggaggccgcggagaagcgttcgagaagtgcacttatctcaaaatcggcgtgaaagaagccaaagaccaggtcgaaacagctctctatttaggcaaacagccgtatgtggataaagaccgtatcggtatctggggatggagctatggcggatacatgacattgatgagtatgagcgaaggaactccggtattcaaagccggtgtagctgttgccgcacctacggactggcgtttctacgacactatatatacagaacgtttcatgcgcaccccgaaagaaaacgcagaaggatacaaagaatcatccgctttcacacgggctgacaaactgcacggcaatctgttgctggtacatggtatggcagacgataatgttcacttccagaactgtgcagaatatgccgagcatctggtgcagttgggtaaacaatttgatatgcaagtatataccaatcgtaatcatggcatatacggcggcaacacccgtcagcatctatatacacgattgaccaacttcttcctgaacaatttgtaatggctgacagagtgcgcaagcctgaatggctgaaaataaatatcggtgccaacgaccgttacaccgaaactaaaagaattgtcgactcccactgcctgcatacgatatgcagcagtgggcgttgtcccaacatgggagaatgctggggaaaaggaactgccacatttatgatcggcggtgacatctgtacccgcagctgcaaattctgcaacacacaaaccggacgcccgcatccactggatgccaacgaaccgacacacgtagcggagtctatcgctcttatgaaactagatcatgcggtagttacttcggtagaccgtgacgaccttcccgatctgggagccggacattgggcacataccattcgtgagatcaaacgactgaatccgcagaccacaatcgaagtactgatacccgattttcagggtagaatggaactggtagacctagtgatagaagccaatcccgatattatttcccataatatggagacggtaagacgcatcagtcccctggtccgcagtgcggccaactatgataccagcctgcaagtgatcggtcacatcgcccgaagcggaacaaaatcaaaaagcggtattatggtggggttgggagaaactccacaggaagtggaaaccattatggacgacctgctggcagtcggctgccagattcttacgataggacaatatttgcagcctacacaccggcattatccggttgccgagtatgtgacgccacaacaattcgccacttacaaaaccatcggtttagagaaaggattcagcattgtagagagtgctcctctcgttcgttcatcctatcatgcagagaaacacattcgatagaaaacaaaacacattccctatttgttttataggtaaaaccggcaaataaacataaagatggatcataaaggaacactttcttccgcgtttaacatgtcattgggttttatccccgttattatttccattttattgtgtgaatttataacgcaagacacggctatttacatcggtactggtataggtatcgtagggatatacctattactacaccgtaaaggagcgctaattcctaattttattctttatattgccaccggaatgctggcactgctgtcacttgcagccttgattcccggtgactatgttccgccaggtgctctgcctcttaccctggaagtcagtatcctcattccgatgctgatactctatatgcataaaaagagatttatcaaccactttctgagacagataggctcctgcaataagcgcttgtatgcgcaaggagcagaggcggcagttgtttcggcccgttttgcattgatcttcggtatcctgcattttattattatcagtattgtcgttgcctgtcaggaccctttaagccagacaagtatggtgatactttataaggtatttccccctgtcgtatttgtgatgagtatcctgttcaatcagattgctatccggtatttcaaccatctgatgtcgcacacggaatacgtgcccatagtcaatacgaaaggagatgtcatcggaagaagtcttgccatagaagcactcaactataagaatgcctatatcaatccggtcataagaatagccgtatctactcacgggatgctgtttctttgtgacagaccgatgaatgccatccttgataaagggaaaactgacataccgatggaatgctatctccgttatggtgagtccctcaccgaaggagtaaaccgcttggtgcacaatgcgcttccacacgcaacggaagacttcaagccagagtttaacattgtctatcacttcgagaatgaagcaaccaaccggctcatctatcttttcatcgtcgatatcaaagatgattctatcctttgcactccccgcttcaagaacagtaagctatggagtttcaagcagatagaagaaaatatgggcaaaggctttttcagcagttgcttcgaagatgaatacgaacacctgaaagatgttatttgtataagagaaaaatacagggaatcttagacaattcgggaatatgccctttccagtctttcaccgtgcgggtttgtataaactcgccttcgcaagttatattggcagcaatacatagttttgtctgcggacggcaattctgcaagatatcttctatcatcttatgattccggtaaggagtttcgatgaatagctgtgtctgactttcagcatagacacgctgctccagtgttttcagtttcttagcccgttctcccggttctatcggcagatagccatgaaaggcaaagctctgtccattgaatcccgaagccattacagaaagaataatagaggaaggtcctaccagaggaatcactttcagtttctggcgctgggcaatggcaaccacatctgctcccggatcggcaacggcaggacagcccgcctccgaaatcacccccatcgaggctccacccgccaaaggcttcagataaccggatatatcttcgggagaagtatgcttattcaaagggtaaaaagtcagcgaatcaatatcaatttcccggtcaaccttcttcagaaagcgacgggcagaacgaacatcttcgacaataaaatgccggataccacgaataatctccgtattataagaaggtaacacctgttcaagaggtgtatcgcccaatgtaacgggcaacaggtaaagagcagtttccactttaggtaataggtgataagtaataagtaataggtatgggctagagtttcaggtaaccggactcttcgaacatactctgataatcggtaagctctaacagatcctttattttaagatctttatgctttttcatgtaggatgcgataatccgtgctcccacccacgaaccgatcaatgcaggggcttgtcctcccagcatatcaacagtcggcgccggtttcatatagtagcggatcaccattgggtcacgtgcgtgcagatgatcgtttgcacagatatactcccagatatccttttcattcttcctgcaccattcgttctcctgatcggagtatcccattgcctggccaatatcgtcataaccaagcagatgctgcaccacataattgattttgccggaatgcatcatcagatcgaccaggcaagtaccttcatgatagtccagtccgtaacggctgagaagatagaatgcgaaacaatccggcacaatccgttccggacgcatcgaggtacattgatagtcatagtagaaacgcttgtagagaggatagtcttctcccatatacttatcaaggctgattcccagcaatgtatctaccagaatgatcgattcattgaatgcggatatctgcgaataaataaatggtattttcgtatcggggacttccttcttcaacttccggaatcctttggtgagccctttttctacttcgtcaagattgggatatttagcttcgacatcgctcagcaagcgaagcaaggtggtatccgagtagaatttttgcaaacgttgagaaatggtatcgtcctttaccgtaccaatagacagtacatcttctatcagaatctttgtcggctggcgatagtccattgtcagtttctgcatagcggaaaagctgttggagcgaacatattcgctcaacagcttatcgtatctcagaacagaaatcccttcttccttctgctccgcaactgttcctgtgcttaagccgcaggaggcgaaaagcatacctattaatatagtaagaagagagatccgtagtttcataaccttttatccgtaaatgatattaccattttcgtccatgtactcatccagtcctttttcgtaagtagccattgcacgaagactcatacctacgctggagaaaccaccgtcatggaacaagttctgcatggtcaccttacgggtgaggtcggagaacatcacgatacaataatcagcacattcgtcagccgttgcatttccgagcggagacatacggttagcgaaatcatacagcttatccatacctttcacacccgaaccggcagttgtgaatgtaggagactgcgaaatcgtattcacacgtacgctatgttcgcgtccgtagatataaccgaagctgcgtgcgatagattccagcagggctttagcatccgccatatcattgtagccgtagaaagtacgctgagcagcgacataactcaaagctacgatagaaccatattctgcaatagcgttcagtttcttggcagactggatcatcttatggaacgatacagccgaaatatccaatgtcttatccaacattccatagtcaaggtcatcataagtacgtttcttgcgcacgttaggagacataccgatagagtgcaatacaaagtcaatttgtccgcccagtatatccatagatgtcttgaatacattcgtcagatcttccacactagtggcatctgccggcactacctgacagtttagtttttcagctaatgcattgacttcacccatacggatagccatcggagtatttgataatgtaatagttgcaccttcttctacggcacgctctgctactttccaggcgatagactggtcgttcagggcaccgaagattattcctctttttcctttcaacaagttgttactcatatcttttaatagttaaattttgtgcaaagatagtatctttctgcataaaaacacgagaagtgtgcaaatattagacataaatgacaaaaaatacacgtattctatcaataactccacatccgcctgaagtttcccccctatctttgccaatgataattaagaggttttttcataatatttattttaaggttagaattaggttaacatgaatttgtcttattcctttccggcaggctgcctgcgagaggtcgcctgcggagggagataagagttatgaaaaagccatcttaacaatcgaaagagaataccagaaaaacaataaatgtataaccctatagaaaagttactaaatgaacacaatgacaagaagactcctctggatggtcgtatgttgtttgccgtttgtctctggatgcaaacaaagtgagtgtgcaataagcgaaaccgcaatagacgacaccatttaccagaatttacctttcgaaatgccgaaagtacagcagccggtttttcccgcttatgaggtaaatatctctaaattcggagccaagggggatggaatgaccctgaatacgaaagcaatcaacgatgctataaaagaggtgaaccaacgtggcggaggtaaagtgatcatcccggaaggcacctggctgaccggacctatcgaactgctcagcaacgtgaatctttatacagaacgcaatgcactggtactcttcaccggtgactttgaagcatatcctatcattcccacttctttcgaaggattggaaacacgccgctgtcaatcaccgatttctgctcgtaatgccgagaatatcgctatcacaggatatggaatatttgacggtaacggagactgctggcgtccggtgaagaaagaaaaactaacagcttcgcaatggaataaactggtaaaatcgggtggtgtacttgatgaacaggaaagaatatggtatcctaccgccggttcgctgaaaggtgcaatggcctgcaaagacttcaatgtgcccgaaggcatcaacacggacgaagaatggaatgaaatccgtgcatggttgcgccccgtattactgagtttcgtgaaaagcaagaagattttgctggaaggagtcactttcaagaactcaccgagctggtgtctgcatccgttgtcatgtgaagactttacagtgaataatattcaggtaatcaatccctggtattctcagaacggagatgcactcgacctggaatcttgcaagaatgcactgatcctgaatagtgtattcgatgcgggtgacgatgccatctgtatcaaatcgggtaaagatgaaaacggccgccgtcgcggagaaccttgccagaatgtaatcgtaaagaataatacggtactacatgggcatggcggatttgtagtaggcagtgaaatgtccggtggtgtgaagaatatctatgtagaagattgtacattcctgggaacagatgtaggtctgcgcttcaaaagtacccgcggacgtggcggtgttgtagaaaacatctatatcaataacatcaacatgatcaatataccgaacgaaccattacttttcgacctgttctatggtggcaaaggagccggagaagaatcggaagaagatctgctgagccgtatgaagacagcgattcctcctgttaccgaagagactcctgcgttccgtgatattcatatatcaaatgtcatttgcagaggttcgggacgtgcaatgttcttcaacggacttccggaaatgcctatccgtaacgtaaccgtgaagaatgtggtgatgacagaggctactgacggagtcgttatcagtcaggtagacggtgtcacactcgaaaatatttatgtagaatcaaccaaaggaaagaatatactgaacgtcaaaagcgccaagaatctgaaagtcgatggagaaacttatgaagagattgacgccaaaggacagatattgaatttcaaataagagattccaccacagaaaaccacaaaatcattatatagagtaaaaagctcaaatagcagactaatttatcttccaaagataagccggtctgctattttttcaattacttttgcagaaagaaatacgacgtataatatcatgccttaaaatcatgaagaagaatatttttatcatcacactccttgtcgggtgttgctctctgtccgcctgggctcaaaaacaggagaagaccattactgtagaagtaaacaataactgggaccgtgccaagacggatgaaccggtagtaatcaacttgcgtgacctgcataccggatttaaagtaaagtccgccatagtaatggaaggaagcagtgaaattccttctcagctggacgacctgaacagagaccgcaagatggatgaactggcattcgttaccagcctccttgctcacggaagaaaaacattcctggtaaccctgtcttctgaaaagagtacgaaaacctatccggcacgggtttatgcggaaatgttcattgctgacccgagaaaaggaaagcatcagtcagtacaggcaatcactgtccctggtacaagtaatatatatagtatggtccgtcctcatggtcctgtactggaatcggaactggtaggctatcgtctttactttaacgaaaaacagacgccggatatctacggtaagttcaataaaggactggaaatcaaagaatctcagttctaccctactgacgaacagttagcaagaggattcggtgacgatgtcctccgggtattcgacagttgcggtccgggtgctttcaaaggatgggacggaaagaaagcaactcatatcactccggtggctacccgtacggaacgtatcatctcttacggtccggtgcgtgtcatcgcagaaatcgaagtgacaggctggaaatatcaaaatgcggaattggacatgatgacccgttacacactctatgccggacaccgtgatcttcatatcgaggcattcttcgacaagccgattaagaacgaagtgttctgtacaggcgttcaggatattgtcggtactgcggagtcttattcggatcacaaaggactggttggaagctggggcactgactggccggtaaacgacaccgtgaaatatgccaaagaaactgtaggactgggaacttgcatcccccaacgctatgtaaaatcggaagagaaagacaaagacaactacctttatacgatcacagccccgggaagtaaatacctacagtatcacaccaccttcacttccatgaaagaaactttcggctataagacaccggaagcatggttcgcttatctccgcgaatggaaagaagaactggcacatccggtaacagtcaaaataaaagagatgcattaaacagagcatacaaatacaattaaacaatcaaatactggaatatttaccagtttttataccgactctgcacaattattactcctttgtgcggagtcttttttttacctttgccccattgagagacttcaactgaatctttaatatcaaactattatacctatatcatgaaacgattgacacagactttagctttttgcctgctaactgttttcactgcggtagcacagaaaaactatgtatccgaagtatgggtttccgatctcggaaacggcaaatacaaaaatccggtgctctatgccgattattccgatccggacgcttgccgcgtaggagatgatttctatatgacttcttccagcttcaactgtctgccgggattgcagattctacattccaaggatttagtgaactggacgattatcggagctgctgttccctatgccctcactcctattgaaactccggaacgtccggaacatggtaaccgtgtctgggcacccagcatccgccatcataacggagagttttatatcttctggggagacccggatcaaggcgctttcatggtaaaagccaaagacccgcaaggtccgtggacggaacctgttctggttaaaccgggaaaaggaatcatcgatacctgcccgctttgggatgaagacggaaaagtatatctggtacacgcctatgcaggaagccgcgccggactgaaaagtgtaatcaccatctgtgaattgaataaggaagcgaccaaagccatcaccccgtcacgtattatcttcgacggtcacgaagcacaccagacgtgtgaaggcccgaagttttataaaaggaacggctattattatatcttccatccggcaggcggtgtgccaaccggttggcaggtagtactccgttctaaaaatgtgtatggcccttatgaatggaaaactgtactggcgcagggtgattctcccgtcaatggacctcatcagggagcttgggtagatactccttccggagaagactggttcttccactttcaggatgtaggcgcttatggtcgtcttgttcacttgcaaccgatgaaatgggtaaatgactggccggtgattggtattgacaaagatggtgacggctgcggcgaaccggtactgacataccaaaaaccgagtgtcggaaagacatatcctatttgtaccccgcaagaaagtgacgagttcgacggatataccctctctccgcaatggcagtggcatgcgaatatcaatgaaaaatgggcatattacgccggagataaaagttatgtcagactatactcttatccggtagtagcggattataaaaatctgtgggatgtagctaatctgctactgcaaaaaactccttctgataatttcaccgccacaatgaaactgacctttacacctaatcccaaactgaaaggtgaacgtacaggcttaatcgtaatgggcagggattatgcaggattgattctggaaaatacggacaaaggtctggtgctgtctcaaattgaatgtaaaaaagcagataaaggagaagcggaacaggtaaactcttctgtcggtcttacccaaaacacggtatacctaaaggtacgtttcagttgcgacggcaagaaaattaaagccagtgaaggaggtaacgacctcattgtgatgtgcaacttcagttatagccttgacggaaagaagttcttgccattaggcaacccttttcaggcaagggagggacaatggattggcgccaaagtcggcatgttctgtacccgtccggctattgttaccaatgatggaggatggacagatgtagactggtttcgtattacaaagaaatgattcgttttttattcctatctttgtgaactgaaagataggaatacaggactaacattaaaaaacaggaagttcaatgaagaaactagtcattttcgatttggatggtacattactgaataccattgccgaccttgcacacagtacaaatcatgctttgaataaattaggatatcccacccatgaaattgaaaagtataacttcatggtaggaaatggcatcgacaaacttttcgaacgtgccctgccggaaggagaaaagtcaaaggagaatgtgttgcgtgtacgcaaagaattcgtcccttactatgacgttcataacgccgatgacagccgcccttatcccggcattccggaattgctctcatacttacaggatgcaggtattcaaattgctgtggcttccaacaaatatcaggcagccacccaaaagttgattggccattattttccggaaatccattttaccgctgtgttcgggcaacgtgaagggataaaggttaaacccgatccaaccgttgtattcgatattctggaaattgccaaagtaaccaaagaagaagtgctgtacgtgggtgattccggcgtggatatgcaaacagctgccaatgccggagtgacagcgtgcggagtaacatggggattccgcccacgtgccgaactggaagaattcagtcctcaatatattgtagataccgctgaggagatcaaatgtcttattctctaatatctgaatctacagaaatatctcattcttcaagctgtacgatagatctatgcggattatatcaacatagatctatcatgcagctattttttttcaataacagaacgatattttaaagattctgcgaagagaattgaaaaccgattcccgcatcatataatttactatttctttttaacttcagaaaatcaatatccggcagacttccatccgccttacgaggcagcgttaactgagaagcatccagactcacaaagtcatcctcctccacagtcaaatccacgggaaggaaggtgttattgacaattgtacattccttagggtccacatcgactatatgctttcctgctgatctgggcatataggacaaattattccgaattacatgaccgtaaccgcccacattcactatttcctccgctgatttacgattcagcatacagaaattagacggattctgataaccggtattattgaaccaagaaattcctcccaaatggtgattggcataaaatcctttgttcttgtttttatatgccagacaattcttcactacatggtgtggaatctcattcggcatcttcacttttgagcgcataccatagccacccgctttaaaccctgtaccatctcccgcacccacaaatcctccgggcttatatccattataaaacgcccagcaatcttcaatcgtataagctgcttgtgcctttatcaaatcaaaaccgtcatcactattgtaccaggcccgacatcctttaaacacatttcccgtataggaggcagaagccggatgcccaccgaagccatccacatttccaccggtaccattctcagatacagggtcataattattataagcatcacagttcagtacgagattatgacttccccgcaccaaataaaaaccaatagccatgccatcgtgcatcgccagattctcgtaaatattatgatttccaccttgattgtatatacactccgactgagtatgctcccggatagtaacctgtgttttgataatctcaaaattgcggaaatggaggtaagagcctgatacataaaagacagatacccgtttaccctccggctttacttcagccagattgaatatcggacgttcatcctgataacctgtatagcagattctcttggcctgagtgccacttttattcatttcaaaaacataagcgcgcaaatgatctcctcccatcatctgctcttcccgtatccgatactcgcctccgcgaatatataccgtatctccgggaacgacttttgactgcgctttttgtaaagtagcgaaaggtttgtcaagcgtgcccgcatttgaatcatcaccattggtagctacaaaataattcgtagccgaaagagacaggaaacaccccataaaaaaaagactaatacctatatgctttttcattatgcttatattttaaaacctattgaaaactgatttccattttactgttgttaatgtgcttctttattacctgactcttatcttctacctctaaacaaatattctgtaaccggaagttttttccagttaccgttttcatgccgctaaattacagctttctttatagtttagaatgtacatgcgtacacaaagcctagaaaatcgtatttcacctgagatttacatcaagaatgaacgataatacatcgtttctttgtttttccgtacgctattacatcctctattctaaaaagaaaattaactttgtaaccattaataataatgtagaatcgtagaaatcaaatatgaaaaatgcactgctgatattcgcattcttatctttctatctcagttcagtacatgcatctgtcgagatacgttcgaacaaactgaccaccggtgacggactggcgaataattccatccgatatatgtttcaggacagcaagggatttatgtggatgggaaccgtcaacggattaagctattatgacggcaactcttttgtcagtatctacccggaccctaatctgccgatttcattggccgacccacgcatccggaatatggaagaagactctaacggttttttatggatcgccaccctctcttctttatatagctgttacgatttaaaacatgggcgcttcgtcgatttcaccggttgcggagaatacaaacagagctattcgaaaaaaatcattgcatccgaccagtctatctggttgtgggataacaataacggctgtcgtcgtgtcgtctatcaggatggccagttctcgtcgcaggcatacaaaaaagaattaggcaacctatcttctgacgaggtattgtttgtctacgaaagcaatgacagtcccggacatgtatggataggaaccaagcaaggattatggaaataccatgacggcaaactggaagcaatggatacacagggagaaagctgggaacatatcttttcttatgaccaatatacctgcatcattaccgggaaaaaagaaatctaccgccactctctttccaataaccgactggagaaaatcgcttcattaaccgaactcggagatacaggtgtaatcaccggaagcctccgcctgcaacatcaatgggtgatgtttaccgccactggcagttacatcctagatcccgttacgggaaagctgcgccggttctcccgcctgaatattaaaaacggtaacgtcaccagagacaataaagggaatgcatgggtacacaactataccggcaacgtatggtatgtcaataccagcactggcgacatcaaacattttcagtttctttcatccgagcatttgggatatatcgatgtagaacgttactctatcattcatgattcacgggatatcatctggattacgacttacggaaacggactctttgcctacgatctgaataccggcgatctgcagcacttcacttttgaagtcagtcactccagccatatcaattccaattatctgcaatatatcattgaagaccgttccgggggtatctgggtgagttccgaattctccggattatctcatctggagattctgaataaaggaacgttacgtatctatccgaatggcgaagatgcttctgaccgctccaacacgatacgtatgcttttacgtggcaaaaacggtaatgtatatatggcaaaccgcatgggtaccctatatgaatatgatgccgacctgaaaaatatacttcgtagagagaagtttacacataacgtatacagtatgtgcgaagataatgaaggacagttatggttgggtatgcgtggtataggattacgtatcgggactgaccaatggtaccgatataacagcaaggataataactccttatcaaacgacaatgtctacttaatctaccgtgaccgcaaaggacggatgtggataggaacatttggcggaggattgaatctggctgtcaaaacaggcaacagttatcaattcaagcatttctttcaaggcagttatggagaaaaacgagtacgcgtcatacaggaagaccgcaacggcatgatgtgggtgggtaccaacaacggtatttatatcttccatccggactcactgatcaactcccccaagaattacgtactttacaatcatgtcaatgaaacattccccagcaatgaaatccgctgtctggtgaatgatcatgaaggaaatatgtggattggaacaacgggagcaggctttgccatctgctatccgggaaatgactaccaacatctgactttcgactgttatagtattaaagacggattgcccaacggagtcatacagtcgattgttgaagatcaggacaataaaatgtggattgcgaccgaatatggcatttcccgcttcaccctcgccaccaagcaaatagagaattattatttttcttcacatacactggggaatgtatactctgaaaatacggcttgcataaatgctgacggaagattacttttcggtacgaactacggcctggtagttctcgatgccaataaagtggaaaacatggaaaaacttgcatcgaccgtattcacagggcttcacatcaatggagcgcatatgttgcccggtatggatgattcccctctcaacgaaaccatgtcctatacagggcagttaaacttgaaacattatcaaaattcatttgtcattgccttttcaacattcaactttttaagcggagcatccaaatattcttatcggatgcctccatatgattcggaatggagcatcccttcagcacaaaatttggcaacgtaccgtaatcttcctcccggtaaataccagttgcaagtgaaagcctgcaatgtagccggcgtatggggggaagaaagcactatggagattgtcatagctcctcctttctggcagacgacctgggcctatctgatttatctggtattcattggaatcgtctgttatttcagtttccatatcatacgaaatttcaacagattacgcaatcgcatcgctgttgagaagcaattgaccgaatataagctggaattcttcaccaatatatcccacgaattccgtacaccgcttactctgattcaaggtgctctcaacaagctaatcaatatagagaatcctcccaaagagatgcaacgtcctttaaaaaccatggataaaagcactcagagaatgttacgcctcatcaatcagctacttgaattcagaaagatgcagaaaaacaaactggccttatctttggaagagacggacgtcattgctttcctttatgaaatcttcctgagtttcaaggatacaagcgagtccaaaaacatcgatttcagttttgagccgtcacaacctgcttataaaatgtttattgataaaggctatttagacaaggttacctacaacctcctatccaatgctttcaagtatactccttctaacggaaagattatattcaaaatagatattcaggaagacaagcaacagcttcgtatacaagtcatagataacgggatcggcatacccaaagaaaaacgttctgaactgttcaagcgtttcatgcaaagcagcttctctcatagcagtgtcggagtaggtctccacttgacacacgaactggtacaggtacataaaggtaatatcagttatgatgaaaatgagggaggcggttctgtctttaccgtcctattgccgactaattctgatatctatcaggagaaagatttcctgattcccaatcagttattaaccgaagaagaggaacagcactccaaagattttctcagaaataaaacgtcagaggatactttccagcctcctgtcgatcctttgaacaaacgcaaagttttgattatagaagatgatactgatatccgtgaattcctaagagaagaaataggagtttactttgaagttgaagtagctgctgacggaacatccggttttgaaaaagcaagtacgtatgatgctgatttaattgtttgtgacgttctgatgccgggaatgaatggatttgaagtgacacgcaaacttaaaaatgaatttaccaccagccatatccccatcatattactgactgccctcaatatagaagagaaatatcaggaaggaattgaatccggagctgatgcgtatatcacgaagccattcaatgtctctttactactggcaagaatcttcaagttaatcgagctacgggataaactgcgccaaaaatattctaacgaaccgggattggctcattccattatctgtaccaatgacaaggatcagaagttctcggtaaagctgaatgaagtattgaatgagcacatgaccgataccgatttttcggtcaatgactttgccggaataatgggactaggacgtactgtattctataaaaaagtacggggagtgaccggttattctccttacgaatatttacgtgtcatgcggatgaaaaaggctgctgaaatgttattgacagaagatctcaccatagccgaagtcgcctatagcgtaggtatcaacgatccgttctacttcagtaaatgtttcaagaaccaattcggggtatctccatctgcctatcggaaaaagctgtctgaagatgaaaatgaacccataaatgatgccgacgtatgatcttacaggttttccgtactaatttaaggggtgtttctttcattgatgtactttctttgccaatgaaaaattaatcattaagaaatcatgagaaacaaactctttctatttgtatttctgtttgcagtgctggctattgttgatagtcacgctttcgaacgcaaaaaatacaatttcaacagtgaatggcgtctacaaatcggagactttcccgaagctaaacaatctcaattcgacgatagccggtggaaagcggtcactttaccgcatgcctttaatgaagatgaagccttcaaagtgtccatcgaacagttgacggacacagtggtatggtatcggaaacactttcggattccggcttccggtaaaaaacaaaaagtattcatcgaatttgaaggagtgcgccaagccggtgacttctatttgaacggacaatatctgggaaaacacgaaaacggagtaatggcggcaggcttcgacctgacaccttatattaaagaaggtgacaatgtactggcagtacgtacggacaatgactggatgtatcgcgaaaaaagtactaactccaagttccagtggaacgaccgtaacttcaacgcaaactacggtggtctgcccaagaatgtattcttgtacgttacagatgaagtgtatcagactcttcctttatacagtaatctgaaaactaccggagtttatatttatgctaaagacatcgacgtaaaaggacgcactgccaccatccatgcagaatcggaagtaaaaaacgacagtcgtgaaccacgccaatttagctaccaagtggtcttgctggatgctgacggcaaacaggtgaaaagcttcgaaggtgagaaagtaaccttacaaggtggagaaacaagggtagtgaaagctgcttccaaagtaaataatctccatttctggagttggggatatgggtatctttatactgtccagacgattctaaaagacaataaaaatcaagtctttgatgaagtaagtactcgtacaggtttccgcaaaacacgatttgcagaaggcaaaatctggttgaatgatcgtgtgatccagatgaaaggatatgcacagcgcaccagtaatgaatggccggcagtaggcctgtccgttccggcgtggcttagtgactactccaatggcctggtagtaaaaggcaatggtaatctggtacgctggatgcatgttaccccatggaaacaagacgtggaatcctgcgaccgcgtaggtctgattcaggcaatgccggcaggagactccgaaaaggaccgtacaggacgccaatgggaccaacgcacagaactgatgcgcgatgcaatcatctacaaccgtaataatccaagtatcttattttatgaatgtggaaacaaaggtatcagcagagagcacatgatagaaatgaaagctatccgcgaccaatacgatcctttcggcggacgtgctattggttctcgtgaaatgctggacattcgtgaagctgaatatggcggagaaatgctttatatcaacaagagcgtgcatcacccgatgtgggctacagaatattgtcgtgacgaaggtttgagaaaatattgggatgaatacagctatcctttccacaaagaaggagacggaccgttacatcgtaaccaacctgcaacagactacaatcacaatcaggacatgctggcgatagcaatgatccgctgttggtatgattattggcgtgagcgtccagggacaggtcgcagagtcagttccggaggggccaaaatcattttctcggataccaacacacaccaccgtggtgaagaaaactatcgcagaagtggagtaacggaccctatgcgcatcgaaaaagatgctttctttgcacatcaggtcatgtggaacggatgggtagatacagaagaagacaatacctatatcatcggtcattggaactatcccgcaaatacagtaaaaccggtctatgtcgtttctacaggtgaagaagtagaactgttcctgaacggtcagtcactaggaaaaggcaaacgcgaatacaatttcctgttcacttttgacaatgtggcttttaaagccggtaaactggaagctgtcagctacaacaaggccggtaaggaaataagccgctacgcagtaagcacggttggtgaacctgccggactgaaactgacaacgatacaaaatccggaaggattccatgcggacggagctgacctggcattaatacaggtagaagtggtagataaggatgggaaacgctgtccgcttgacaaccgtaccattcaattcgacctgaaagggaatgccgaatggcgcggaggcatcgcacaaggaaaagacaattatattcttaataccagtctccctgtggaatgtggtattaaccgtgctcttatccgcagcactacccaagccggcaagatcactctgaccgctaaagcagaagggctccccagcgctacaattacattagaaacccttcccgtcaaagttagcaacggattgagtacttatttgcctcagatgactctgaaaggaaatctggataaaggtgaaacacctcttaccccatcttacaaagacacaaaacgtgatatacgtattgtatccgctaaagccggagccaacaatgaaactgtaaaccaaagcttcgacgataatgaaagaagcgaatggatgaatgacggaaaactcagcaccgcatggattacatatacgctcgaaaaagaagctgcaatagacgatatctgtatcaaattgaatggatggcgttcacgcagttatcctttggaagtgtttgccggcaatactatgatctggagtggagatacgaataaaagcctggggtatgttcatcttaatgtggaaaagccggtacgttccaaacaaattaccatccgtctgaaaggtaataccagcgatcaggatgctttcggacagatcactgaagttgcggcaaaagcagcaaatgatatggaactcgaagcaaaagcgaacaagaataatgctaatctgagaattattgaaatagagtttctggaagcaatcaaatagaataaaacattttctcccaccataaaggagatatgtaaaagaaggtgtcacaaaaaccatattgccccataggaacaaaagattagtacggagaaacaaccgtcaatgaaccgttcagtaagctattatgcaggctagattaatgtatccggtcagtaacaatagattgtttcatgtacgtggtcccatcagtctacgtacatgagccattgggtttacgtacgtgagccgaacggttcatgaacatggaacgaagacataaaaccgacttaacagattaatcaaaccttgcttgcatattaaggttaccgggctttgttcttaatgtaagcagcataccttggaaacattaaggtgtaaacagcgtacattgacgcccaaaatgatgtttttaacacatgcaggcaaaaccctcaagctgactatctatcatctgataatcaagactttaaataaaagattcatcaaggagaggtgacaataagaatgaaagatacattctattgtcaccttattatcaccctctattgtcacccctatcttctttattataaaacacttaaatcagaaaagtgacaagtgacaataacaatggataaatatttcctatgtatatgtttaaacagaaatgagtgtagtctgaaacgaccagctatttctttattagtttcttaacttctttagcatagcgtttgcctaaagtaatctggcttgctgcatcaaaatgaggatccgtttcatccttcaacggagtaagtccttcggaagacacacaagcactatggggcaaaaaagtggagatctcttttatcatgtcattaaaaggttttgtaccttcgggaatataaggtttctttgtccagttccattgtgctatttgtcctacgacaactggtaaatcaggcattcccaggtcattacgtaagtctgtcatcagctgaataatcttctctttatatgcttccggatgatgacaatcggcttctccctgatgccagataattgctttcaatgtaccatacttcattgcttcttttgcacgtcgtattgcttcatcataatatccaccggactgtttggcattcttaacccatgaacgaatcgaagatcctccccgtgcattgacgattaagcctaccggatgttttttagtagccatcgtcttggcaaatccatatgcaggtcctacttgttgccagctaagtccttttcctatcgtagaatagcggttcaagggattcactgcgggttcgaactgatcatctgcattcagcaggtatacattttgtagagtatccatcacttccggtgataatttccctctccctgccatattcgactgtccaatgcaaagatacagatccagagtcttcagcggtttctcagcgtgtgcttccgatcttccccatactagcacacataaaaggaagaggccacatagataatttgttttcattattttattgattttattatcaggttaaactttattcgtacacacccctaattaaaatgaattttaatagttcctccataaggattaaagtcaaacataactttattcccatttatatacacaggtaattctttcctgccttgcttcaccagaattccattcatagtttccccttgaatcaccatcgtcaatggctcagcaaatagttttctatctaattttaacttgggagtaattgtcataccattctttttattagagactttcaattgtatctcctccctttctttgatataagatgccacttcacagaaggtacctacccaaatctgattttccatacttttcactttatccaaatgttcccaaaataaagaaggcgatttgaaagcatcatatccataattaatgccgtgcgtcatacctactccccaatcttccgctttcatcaaatccttcaaccatttgtcaaaccgttcgggagttgactttcctccgattgaaatttgtttagtacgtgtagcgaccctgcctttagaagccatactgactatttcttctgtcttataattatatgggtaacaataggtacgaggtacaatgccaatattagcataaatagcactatcattcttttctatctccgatttaacttgctctatagtcaatcgtttggcattcttatgtgcccagctatggctggaaacctcatgtcctttctttgacatttcacgcaactcatcccaagtcattcgaggtacctttgcagatgcaccttgttccgtataatagccgcatacccagaaagtacctctaaaaccacgtttctccaactcaggggcagctacagttgaatgttctgccaacccatcatcaaatgtataactgatagcacaagctctgtctcctttatatttggcgacatatacatgaggatcatccgaaagagtctttttaatttgttcatatacctgtttacccatatactcggcagaaacctgattaaaatgaagtttatctcccattagttccgcttccgacatatcaatcagataagcgttcttatcttcttttgcatagcgacgcattccttcctcaacatcactattataccgtttgtttttcctggatacggtaccaaatataaatggaagttcagagtaatcttttccggttttctctgtcaggtggttacgcacataggaaactactcctttcagattctgataatattcttttccgtgctcataatcactttctccctgatgccaaacgaaagcatcaatctgataaccttgctttagtttggaaagtgtctgatcaatactcgcatcaatattggcaatcaaagaaagtaataaagattttcctttctcactggtagctgtattctctgccaaccatttcgggtcggcaaaccagtaagttccccgaaaaggagtagtaacaggagcagctatggcagtgccaccgatagcccacttgataacataaaaatcttcctgaaacaactgttccaaccaataataagcaatcgcatcatatccccacgtataaggcttacttttaggatgactcaatggccaaaatggaacaaacataccatctgtacgattatgggcaatatggcaatatttgtaggctcccgcagtatacgtactatccacagccattgcctttatataatccggtaaacgattgttaggtactcgtccatccgtgtttgactgaccagctgttattataacatgtgcaggcttctgccctctcgcctgaatataacaaaagcctaatacaaaaaacaagataaaaaagagtgttctcatgatcaatgatcctttaattttatagtaatattctcctgcaaaaataagggtacttttactattcgaccatagactattgtacacaaatacaaggtcgatcattcatatcgggcactacagagaagatttaaactaccatttagaaagcttggttactcaggcttctgccgtctcattttctccctgttctttcatttcaccgcgttgatatacggacggcgctaccccaaactgagtcttaaagcacttactaaaatagaacggatcgctgatgccaaccttgtaagcaacttccgcaacagtcagattctcaccagacaataacaactcagccgcttttttcattcgtacaacccgcaaatattcattgggagaataccccgtcactccgcgcagttttctataaaataccgttcgtcctaatttcatcaattgagcaaactcatcaatagagaattccggacgagaaagattctgttccagtacaacagccaatcggtcggcaaattccttatcacggtcagtagagcatacggcagcacgaacaattcccggctcactggagaatttctcccgcaacttatcacgctgttctatcaagcggaatacgcgtgccaacagaagttttatactgaacggcttcgcaatataggcatcagcaccggcttcaattccttccagatgtttttccggagaattcaatgctgtcagcaagataatcgggatatgacttgtcgcaaaatcagatttcaatttctttgtcacttcaaatccggtcattccgggcatcagtacgtcacaaataatcaaatcagcatcataggtacgagccttctcaaatccggaagttccgtcagcagctacttcaacttcaaaataaactcctacttcttctttcaaaaattcacggatatcattatcatcttctataatcaatactttacgcttattcaaaggttctgctattttctccggttccggtagttcttccgaaagttccagtaaatgatgtgcctgcccacctgcctctttcaacaagacattaccgggaataaggaaatctttctccgaataaacacttttgtccgtcgggatacaaacggtaaagacagaacctccgccgtcattgtctttatattcaatcgtacctttatgcacctgtaccaattcataactcagatgcaaaccaactccgatactatcaccggaaaaactactctgcataaatctcttgaacaactcattttgcttctcttttggaataccaacacctgtatcagctacttgaatctgcaatgtcttcttcacttcatctaccgtaacagaaagtataatcgtaccgttcgaaggggtatatttaaaagcgttagacaacaggttataagtcactttatccagattacccttatcaagaaacatcttgtaagacggtatagacggaataaaacggaaattcatattcttttgctccgctacatcaccgaaactcaggaagatttcataaaggaaagcaatcacatccgtttcttccaaagagagcgccaacttattattctgcatcttgcggaactccaataactgattgatcagcctcaacattcgctgagtacttttatccatcgttttgagcgggtgtatcagatcacggggaatatcagcaacccgttgaatcttttccaacgctccttgaatcaaagttaacggagtacgaaattcatgggaaatattagtaaagaaaaccagcttatattctgtcaactgtttttccacattaatacgattacgcagactgttaaagttacgcacaatacggaaagtaaaatataaagttacaatcagcaacagcacatatcccaacatagcccagttcgtcttccagaaaggaggcacaatgacaatcttcaaggttgtttcactttcattccaaacacctgctccattacatgacttcacatgaagtacatatgtacctgggttcaaatatttaaaagaagcaaaattcaacggagaaggtgtgctccatcccttatcatagttttccagccagtacatatactttgtacgtccgctgtccgaatagtcaaaagtagagaaatctatcaagaatgaattctgaaaatacttcaaagtaatttcatccgaataagcaagcgattgtttcaatggagaatcctccatagtaggatttatctgggtaccattcacatgcaaatctgtaaagaccaccggagaaaaagtttcgctatcctgaattttatcaggatcaatgacaagcagaccgtaatttgtaccgaaaagcaattttccgtctactcccacacaagcactattctcactataaacattacccaaagtataggaagaaaagaaataattttcaaaagaatgattagtcgggttaaacttagaaataccatattccgtagctacccataagtttccgttattgtcccccaaaattgattgaatcacatcattaaccaatccttcagaggttccgtaatgttcatatttcaatgaacggtaattatcttccggctcacaaagattcaagccggagccagatgtccccacccacatacgtcctttcgtatcacggtagatacatctgatttcattgctgcaaaatgtaccgtttgtataattgaacagatgataatcgtcactgtcagctatcaatgaatccggatgaaagatgcacacaccctcactggtgcccacccagatcattccattatcgtcttcttctattactcgcaccatacgcagaccaaacttctgctgtaaaaaatgacggaatttatacttgccatcagtcgtcggttctgccagttcaagcccaccgccaaaggtacctatccacatacggtctttccggtcacgaaaaagagaaaagacattattttctgataacgaagccggatccgagacttcattgcgataccatgaatctccgatcttcaatccatttccacgggttcccacccacatttcgccttgattatcttctgctatcgcataaatattggaatggaaatactgattggacattttggaatgaagattcgagtcaaacgtatataatccgcctttacgtgttccgacccaaatatccccatccggcattttagtcaacatacgaatcgtattcgagcggtcaaataattcacgggattcgggataaatacgcgaggttccttcattcagaactgaaatacgggataaaccggaatactctgaacttacccaaatacctccggcacgatcctccatcacatataacagaaaatccgaacttatatgactctgatcatttatattagccagaaaatgttctaacttatcctctgtcgtgtcataggcaaacaatccgttaccataagtagaaatccaaatgattccccgggaatcatggacaatatgataacgttcataatcaatgtatcccagtttatcttcaggtatcaactgaaattcttttcttgctccattcttggccaaaatataagtgacacatcccgtatgattatatatccagaagtcaccatgattatcacaaatcacttcaccatttctgatgttcagaccagagtccacactgatcttgcgtgtattgaaatcatagttaaaaaccccggtattggtaaggatgacccatttatcgttcaacaggaagtttcccgtaggtgacgtcttacccgcaacagcagaaagcgaaccgacttttgtcagtttttgctttgtagtctgatagcagtagatgtctccgtccgctgtcagaaaatacatatcattcttgaatgccagagaagaagtaaaatggagtaatctgtcttctaccttatactgtccgtcggatacggaaactaagccacgctgtgtcccgatccagattcgtccgccggcatcttcatttacaaactgtacccggttatccggaagatttccacgctccgtcttaaattccgtagacaccatctgtctgtctttctgatggaccattctgagacaaccattgccggaatgtctgagccatacatccccattagcagcaacaaatatagacgaataattcttttccagcgcaccagtccccgtatagtctacaaaacaggcacgttgcaagtcataacaactgaacaattccggagttgtagagatccataaaaaaccatttttgtcttcggtaaggtcataaatccgattatcagccaaagagactttatcaccgatttccggacggaaagtcagaaaagagttgccatcatagcggcttaacccatttagggtagccaaccacaagaagcctttgctatcctgatacaggtaccgaactgagttattcggaagtccgtcacttgttctcatttgtttggaacggagttcaatgccgccgtaagccgcattgaaaacaagagtcatgaacaatgtgaaaagtaatatgcgcctctgtgtcatatagattctaagattaatgataaatgccagacaaaaatagtcaagatagttgaaataataaagaaacaatccataaatagtatcaggaggatgcttgttttttaatcaaacatccccctgatatcaattctgtctaagggttctagtccatatgaaagacttccggcaatggtattgaaaccggtgaattgtccggattcacttccatgatatctgccatataatcccaccatttctgtacaatctctgtgttgcccaagtcctgcgaacctccttctccttctgttttctggaaagcaaatagaatattggtttctttatcccaatatatagaataatctgacaccccattttttgaaagcagtgcttttaattcaggccagatagcggcatgccttttttcgtattctgcttcatagcccggtttcagatacattttgaatgcttctcgtttcatggttcctatattttaaagttaatcttttatttattcactatctactgcaaagataggagctgttgtcttctgcttttcctgataatattgcacggcactgtcattcatctgaggatgctgggtgttgagcaaacgaatcatttccgcacctgcccaaagcaccggtccgtatccatgcgccgcatatacattgaccggacgataataatagaaagccggatcgaaagccataccggtgcctacgcaagtgccttccacctgtccttcttcatttatctttccggcgacggcatgccatcccaactgggcaacaggaccatacgctatcgcatcaatccaacctttattaatggcgtgtgccagacaatatacatagatagcagttgcagaagtttccagataagaatcattacggtcgagcaactggtgccaaagtccttctccactttgcaacgccgtcactccacgcacatgagcacggaaataatccatcaccttcggacgttggggataatcttccggcaatacatcgagcagttcacaagctgtcagcagcgcccatccattggcacgtgcccagcaaaaagccggatgatccgtactgctttccacccatccgtgtctgtacaatcccttttcggggataaacatacggtctgcaaattgcaggaattgcttcacggcttctgccagatatttattcttcgcttccttatcataacgactcatctgcgctaccgccggaatgcccataaacatatcatccagccaaagagtattccgctgaggacgattacgggcaaacgttccgtctgccagacgatattctttgttgatgataaaatcaaagtaattctgaattaatccgtcaaccggaagagactcgtctttcaaccgtaatttaatcatggcagtacatacggctcccgcatcatccaacgcatgaggagtcaggatttgcaacaattgcgaatcagtcttccctttttcttcatagacacgtttgaaatgcggagcgacttccgccaaaaagcggaaacgattctgaacatagtcagtataacgcttatcacctgttgtttcggcagccgctatcagagcggaataagtgacaccccattcataacttgccagacgaaaagccccgcgttccagctgcgcctcatcccccattgcagtataatccgtaatcaccttaccggtattcttatccactacacgagccggtgtctccttatctatatacgcaaaaacacgatcgatgtcttttttaacctgttcgggggtcaaatcaccataagtaccctgataagcaggttgcagtaaatgcaagggggtatttgaatcattgattactgctttctttttctgcgcacaggcaggtagtgctaccaataacgcagcaacggtcatcatacgataattcataatttactttttaggtattttacatcctctgaatatagtgccacgcaactccggaccaaaatagaatccgggctgagtaggctgattataagccacattttgagtcgcaatactgatacggtaaaccggatcttccaggaaagtatggaaacggtagtccgtaggaatggtagagacataaagcctcaaagctgtattatcggctgtacgtaacaatacttcttctcgccagtctcctacaatatctccttgcagacaaggagttgactttgttccgttattagaaagagcaccttcaaaaacagcgatacgttcacaaagtcctttctcccaattatatttactgactacattacgatccagcaactcacgcaagagatcaccatcccaccagacagccatattcgtagacaatcctctgactctggaagcaatcacttcccctttcacatttctgacacctttagaatctaaagaccacatttcaactccgggatgattaggatcaatatcagcagccatacaacgacctacatcagtattactctttatctggaaaataatttctcccgtagctgcatcccggaaagttgagccatctcttctgttctcgtggcaactccaaacctgcaatcccggacgggaaggatcaaagtgagtcagatgcatagcatcaccatgccccatgcgggtagaataaagtccggttccatcgttattgatcgtacattgtccatatacaatctcatcgcagccgtcaccatctacatcacctacacgaagattatggtttccttgtccggcataagctctgcaaccgggattattactgtcgaatacccagcggttcttcaaattcttaccatcccagtcataggcagccaatacagtacgtgtataatatccacggcacatcaccacactcggatgtactccatccaaatacgcaatacaagccagataacggtcgctacgattggcacgtccgtcgccccagtccatcagattgccacgttcgggcacataatcaatcgtttgcattgcttctccggtcagtccgttaaagatggtcagatactccgggcctgtcaagatacgtcctcgctcattccgataatccgcattcgcatcaccgatcacctttcccgttccgtccactgttccgtctccggtcttcattaccacttccgcacggccgtcaccgtccagatcgaagaccataaactgtgtataatgtgcaccggcgcgtacattgcgtcccatattgatacgccacaactgctgcccgttcaacttataacagtcaaaaatcaccggtcccgtataaccgtcatgagcgttatcatgtgcattggacggatcccatttcaaaataatctcatattcaccatccccgtctacatcaccgatactggcatcattcggagcataagtgtatgcttgtccggacggagtagtacctccctcggggcgtaccaaaggaatatttaaatatcctgtcggagcatctgccggcagttgataattgctttctgttttaccttttatagcttttaccgtatagagtgcaggttctgttccctgataagaatcctggaagaaagttgcatttttcagcggatgtttattcacctttttaccatcccggtatatatcaaaggattcgtccatcggatcagaagaaagatagcgccaagaaacgactacggttgacggattctcacgaatggcaattacgccacgtcctaaatgttctcgtttcagtttagtaaaatcatagtttggctgggcaactacaaaagtcgctattaccaacaaactaaaaaagatgcttgtacatttcatagttttatcattaatcaaagtgttcttatcatatttagaataacgtcgtgcaaaagtaagcgatatggtctacccataaaatagaatatcgtacaaatctatgtataaattgcctttttaaccatcgcactccctttccgaaggcattatggacaaatttaaatacttgtggacaatattccattgaagaggaaaaaagattcccctatctttgcccgtgaaatcaattatagtagctaattttatttataaacagtttttataccatgaagaaattactcctctcatttattacagcaactctcctgagtagcatgtctgccggttcagccggtgcgcaagagttgcccgaacaaaaggagactttggcaaccatcgtaaaagtaaacgactactttatgaaaaagtatgccgattataccctaccctcgttttttggcagagttcgccccagcaatatctggactcgcggagtatattatgaagggctgatagctttatatagcatttacccgcgcgaagattattatagctatacatacgattgggcgaatttccacaaatggggaatgcgtaatggaaacacgacccgcaatgcggatgaccaatgctgcggacaagtttacattgacctatataatatgtgtccctccgaccctaacatgatccggaatataaaagccagcatcgatatggtcgtaaatactccgcaagtaaatgattgggactggattgacgctatacaaatggcaatgccgatttatgccaagtttggcaagatgaccgacgaacaaaagtactatgacaaaatgtgggatctgtattcctatacccgcaacacagaaggagaagccggtatgtacaatgccaaagaaggattatggtggcgcgatcaggattttgatcctccttacaaagagccgaacggcaagaactgctactggtccagaggaaacggttgggtatatgcagcccttgtgcgtgtattggatgaaatccccgctgacgaaacacatcgtcaggactatatcaatgacttcctgaccatgagcaaagccttgaagcaatgtcagcgtacagacggcttctggaacgtaagcctccacgatgaaagcaatttcggaggtaaagaaacttcgggcacagccttgtttgtatacggaatggcatggggaatccgcaacggattactcgaccgtaaagaatatctccctgttgcactgaaagcatggaatgcaatggtaaaagaggcagttcatccgaatggtttcttgggctatgtacaaggaacaggcaaagaaccgaaagacgggcagccggtaacttacaaaagtgttcccgattttgaagattatggtgtaggatgtttcctattagcaggtacagaagtttacaagttaaaataagagcattatttatcaggtaaatgaaaaacaaggtatttcactgcttatgctggctcacagccatcatatgcagcttgcagatgcaggcacaaaacaacattgcttctccaatgaaagatgtgaatcaggtggtagacaacacactggacagtctgaataaagcacgcacggcacgccccgttgccggagcaagccgtaaaggtaacaatccggtcttattcctggtcggcaactctaccatgcgcaccggtactttaggaaacggcaacaacggccaatggggctggggatattacgcaggagattatttcgactccaaccgaatcaccgttgagaatcatgctttgggaggaactagcagccgcaccttctacaaccgcctctggccggatgtaatcaaaggcgtgcaagccggagactgggtaatcatcgaactgggacacaatgataacggcccctatgacagcggacgtgcccgcgcctccattccgggaatcggcaaggacagtctgaatgtgacaatcaaggaaaccggagtcaaagagactgtatatacctacggagaatatatgcgccgtttcatcaacgatgtaaaagccaaaggagcacacccgattttattctccctgactccccgcaatgcctgggcagacaaagacagcaccatcattacccgtgtcaacaaaacattcggtttgtgggcaaagcaagtagcggaagaacagaatgttcctttcattgatttgaatgatatcagcgcccgcaagtttgagaaattcggcaagaataaagtgaaatatatgttctatatcgaccgcattcataccagcgcttttggtgccaaagtgaatgccgaatctgccgctgacggaatacgcgcctgcgaagggctggaattggcaaagtatctgaaacctgttgaaaaggatgaggctaccggttcgagccgcaaagaaggacgcccggtattgtttaccatcggtgacagtacggttaaaaataaagataacgataaaaacggtatgtggggatggggcagcgtgatagcagatgagtttgatctgaataagatatctgttgagaattgtgctatggcaggacgcagcgcccgtacattccttgacgaaggtcgctgggataaagtatatcatgcactccaaccgggagactttgttcttatccagttcggacacaatgacgctggagagataaataccggaaaagcccgtgccgaattgcccggctccggagaagaaagcaaagtatttttaatggagaaaacaggtaaatatcaagtcatttatactttcggctggtatctcaggaagtttatcatggacgttcaggaaaagggtgcgatacctatcgttttaagccataccccacgcaataagtggaaagacggaaagatagaacgcaacactgcctccttcggcaaatggacacgcgaagctgccgaagctaccggagcctattttatcgacctgaataaaataagtgctgacaagctcgaaaagaaaggtatcaagaaagcggcagattattataacaatgaccatacgcatacttctttgaaaggagcgcacatgaatgccaaaagcatcgcagatggactgaaaatggctgattgcccgttgaaacagtacttgaaataagagacagactcatctgatatattcataaagcggttaatgcatttcactgacaatgcattaaccgctttcttctaactattattcatccatcggaatgacctcctgcatatagatagcatcaaggctccaaagtgccgcatcatttgtactgatgctgacgcattcatccaaaggggccggaacttcgggtggaaacagtttagtgatccggaaaggaggcgcaggtgtatgttccagtcgggtgaataaatcctcccatgcttcttttgccattagtgcatcccgcttgtggtaagcagcgtatgccatcagacgggaaattcggaaacggctatgattcaattcccacgccttttgcttataacgtgccgcatggtccagccacgcgtctttccattcgggaaggtcaatcatacgtatcatttcgttcattacctcaaaaccacccataatagtcattaaatgattcgaagattccagcttgggatcacattcactggtgatgattcccgttgccggatcgaaacccagcgctttgggtcccgtaaagatacggttgggcagggctgctatacttttcattccggctacgatcttatcccggtaaacagtgttgcctgtacgctcccactccgtcatccagtttccggcatacgccagccagtccggaccgatacgcagtcgggcaggcgccgtacagggatattcactgcgaggctgtgccagccgcatagggtctaattcatatagtttctgatcggcatcctttacttcagtcatcaagtcaccgcaacgttcatcggtagtgagataataatagaaacggttccatgcagcctgactgatccgggcttctttagcaccgcatccccaatggctgacattatgtcggctgcctaatcccgcgttcggtccgatatggtaaacgtccacttcggctgtatgacgggtcatagcttctgccatacgccagatatcttcacgacctgtacgcaggaagttgtaccacaaccacatattagaagccagttccgtattgtcccaggcaaatccacctatatcataacgccaagtatgacggaccgggtcataagcatgcatcacatctccataattccaaaagccataccatttattctgctctatggctttacgataaaaatcaatatatgcatccaggcgatcttctacccgcgcacgaaaagaagtactccggtccggaaggctccatacgccgaaagcctgctgtgcatgaagatagtctggtgtgggcagcaatattcccggttctgagagtgattcagcaacatcggcaaaagccttttttcctgcataacctttctgtggaataagtgtgagtgtagtggtgcgggcaatgccataaggagtactcattccctcctgaacatcttcgtagctggcattcagatcatgagcgacattatcgtagtgacgtaagtccatcggttctccttcggggctccataaccatgctgtgatcgttgcagatgaagttttggcacccgatatttcgagggatgaaggatatgactgccaaaaatcatgcaggcagagtcccaaacctcccgtaatatcaccgacaaaagcatagcctccgctacgggtgccggagaaagttcctatccaaggattattgtcattggcacgtttgcgaatggagaaagcatcagcagagagttgagacaagcgataatcgttccatgaagcccagttatcaagaagatcacgattcttcccgtcaaaagcctcgtaaggcgggatgcgtttgccatccatctgttgctgttgcagagaaagtgtatcctctttgccgagtgtcagtttacgccgtcctgccagcggttgtaccggttcactccagacgcctccattggcacaagagaaagcgacatgacggttataaagagcttcacgcataggagcatccatacgaatgcccaaggcacgaataaaatccttattttgatctccgtcgtacacaaagctatgtacgatcttgatctgctcacttccggcgtagaagtagagacggactacgaacggaagccactcccgtccggtttcacttctgtgggtgccttccagtttgacgagtgtccgcacctgaccggtacgttctactgtggccgatgtcaatcttccggtatagttagtaaaagtgatttgagaagtattttcaaggaccggttcgctttgagtgttgcatacaagacgtgctttttcaccgactttcactccttcacggaacagactgtcaatcataaaatctccctgacgagggatgtaagcggaaataattcctgtctctatgcggatactttgaggtgtttcaacaacagatagggataatttattgctacgatcatcggcagtccttgaagatgctttttcttttgacttttttccggtctttttgagtagcagtttctccgtatttttcggaataactccggctatccctttccatttcacagaaccatcgggccagtaggccaatgcccaagtatctgtcggaagcatttcacctttatcggtcatcagctgcaaagtgtgctccgggtataattctccttcattgaagggaactcccagacttaccgctttgttttgctgcggagtattaccgatccagtgtaatggtatttcagaagtttcctgcgacgaacattcataatgaaaattggcgatacgagttcgggacaaggtggtacgaaagccgaaccaaccttccgtaaggggttcggcatcgcggaaatccaccaatcgcactccatttatataataactaaccctattattttcattcgttatcttgatatgataccacttgtttgcctccagcaaatggtcggcatctgtatattctttcaagattgcgggacgggctttagtgtctacccttgccgcctcattgccgtcataacggcgaaaacgtgtagtagaattatgattcccaccgtatcccatatagtaaagttgcagggaataacagttcagaaagatgccattacgccatttctcacgtttccatatattatcgggatactgaggatccgaagccatccaaaaacaattcaagtcactcaagcgatcgccttctgcctcaacaacgacgcacgcatcgtactcaatggttaccttgccactcatcttttcttttcgccaaagagttaagcctttggaagaaagaatttcagcggtatcaccacgaaaggttactttataatccggagattcggactctactttccagtatttatgaaactgacgggcgttgagtccggaggttttattatcttgggcgttcgatgccaaagtaataagcaagaacaaaaaaatagatatgcttttcatatgctaatttaggataaggagttccattataaggaacattctcaatggtttcacatcacaaaattagaaaataccacccgaatgataaatagaatatcattcatttaaatggatatttgttcaacaaacggtcttcttccagcaaacagcaatatcattaattgtattaaaagtgacaaatacaaaaaaaacgatctgataaccaagcctaacttgatatcagatcgattcatttatcttcagcgtatatatctatttttgaaacacaagctcacccatacggtctgccgtactaaagactatggaacaaaggccatcttttatttgcaacacttccattccagccagttgaacgatctccggttcagctccggttttactactcaagatctctaacgtggcattcgacttcacaccaaccgacaaatcaccgtcgcaggataacacatattgtcttccttccattacgttggtaatagcaacactattgacgtcggtgaacaaactccaattattggctttatttaattcaatcatgtttccccatacaaaacgctgattatcggtgctcaatacacttgatacaaccactacatcaagtgatacgctgtgtccttccaaatctgttacattcaagacgactttgccgtatttcactccctgaatgtatatcagattttcacgatacttggcggtagcataaccttcttcagaaaaagaaaactggtatccaccgcttccgctttcaatctttagtataccttcacttccttctttgatttgaatagctgtacgatcaagcttcagttcagcaaccgtatcttcgtctttgcaagacgaaaagaggctgagttgagataatatcaagacaaaagatattatataaatattaataaactgtttcatattattctaagtttatccgttttatcttttaaatttaagcgcaatagattttgtaatgtttccgtttgcatcttcaatgactgccttcacttcaagcacgccgctaaaatcagacaagtctattgagttcttatcaaactccgtcgtttcttcgccatctacaatcacatacatcttcgtgaacgatgcagcttcgggtcccactacactggctttacttccaactacaacaattgtcggcttcttcaaccaaccaaaatcaagatcagtaggttcacctgtagcaaaacatcccattccccaaaaacgtaattccgcatcagtagtcagctttccgaaattaacatcaggcaaatctccgttaggcttgcggtctctcatcaattccgcttcttccaaactaataaaatcggtttctatcacttcctcgctaccatcaaacgaattgttggatacttcgctcttcgccctgttcaccattacaatatgcttactacccgatcttgtaaccaatgataagttgttcttaaccatatgatcatatccgttgacatcagtcggaggaagcgccagaggtgactcacggtttgtcatattatagttttctccgctattgacagccgtattgctctcaaatataattccacctaaatgatgattggcataaaatcctctcaatctattgtaataagccaaactattccgtacctcatgttgagggatcacactgggtatggcaggcagtttgtcggcagccattccatagcctccggctttaaaaccggtaccgtcaccagcaacttctttggttccgggtttatacccattcaagaaagaccaacaattaattatcttcacagcctcgaagcaattgatcaaatcgaaaccatcatcactattgtaccatgcgcgacatccttcgaacacatttcccgtgcctttgccttcgccaactgaagatgagttaatgtgaccgccaaaaccatcaacattgccccccttaccaccttcggaaaccgaatcataattgttgtaagcatcacagttcaagatgtgattattgcttcctccaagcaaatagaaaccaattgccataccatcatgcgttctcaaatcttcaaatttgttattattggctccttttacaatacggaaacactctgattgcgtatgaccggtaatagtcacttgcgtaccgatgacatcaaatccctttagataaagattggaacctgtaacataaaacaccgtaatacgctgatctttcggttttacctgcgaaagatcaaaaatgggcctcccctgtttattcggattagccaaataagaaataggtttacctgcttcaccacttttattcatatgaaatacacaatgataaagtccgctattggtagttgtcatcggcacttgattggcgggaaccacatatgttcccggattgatataaactacatctcccgcaactaccacttcctgcacttttactaaagtggcaaaaggtttatctgaagttcccggattagaatcacttccctcaggatccatataatatgtcttttgtgcggctagagggactgataacatcagtcccaaaagtaagtacgttatttttgttatatctttcataattatctttttttgattgaaaaacatgctatttaatgagaagaagacttaccttgcaagtcccaaggtacgaaataagcaccattcataatcttggcttttacttctgcttgtttagcctgatcggattcatatttctgcccgacaaaatctgctatgaatgaatagtcattccaacgttttgccacacgaatcataagcggataagtttttccttcacaagggaattccaagaaggcttctttcaccaattcaatatcattatgctttttgatcttgtcctcgtcactcaaaccgtctaatttttgttctgctacaatctcctctttgatgtcttccggggtctgccacatatcgcgcttgccaagtcctaaaataccgcgaacaccgttatcggcatacgtgcggcggaatcccgcataaagtgttgtccacaatccccagttgcaattcagtccttgccattgttcgcccaatactacaccggctccgtagaagggatccacaccagtattcatcaagacggataccggctcaaaacgtcccatattattcagcgcttcaatcgccatgaaataaagatcagaagtgtgataaatcattatatatgtatcgtcatgagcaacagaatgtccgctctttctaaatccacggtatttgcgtatcgcatattccacatctttttcgatttcctgaatggctctgaaacgcgcatcagatgttttaatagccgttgcatcggcagacggattgaaagtaatatcttcaaaacgttttgatcctggcacagaagcacgcatcatatagcttccgctacggtcgaaatgattcaataacgaattctgctgattgtatttgtaatcatacataataacagattcagctgctgtcaacaccggcatctcagaatcatattgctgaccgtaattgctaccgtaacttcccgaacgcatatacttgatattagcaacatttccttgatactcagccaacgcaaaagttctgctcatttctccaagaatcgttgtagccgctttctgataatcccctttccaaagtgcgatttctgcctgtaatacgaagtatccgggaaccatcatattccatcttttatattcatcgtttgtggaagtagctccgttagctggatcaagccactcattccatgacatattgtatgtaccgtttattccatcaaagcctgtattcaacagtttgtcgcattcatcgacaagctcactcaggttcttaggagtctggctgacgatatctttcatgctttgcatcggatcgtcgaaccatatagcttgtccatatatctttgccaacatgagataagtccatgttttcaatctcaccgtactactaatcagacctctataatcatcgtcatctacggtagtaacatgtgtatccctgtattcttttgctttctgcaaataatcattgcaagcaataattacatcataatacttagcagggtcggcgtatgtgttaccgctcaaatcatcatcataattatagatgctgtaaaggtctgccggtgtattttcggtaggttccaacagctctccacgcatatcggtcagataaatagctttgtctccgatagcttgtatctttgtgatgatacccagaaaaccggaataaagctcgctgccttccttgatatatctgtcaccattcaaggtcgtatcattgtttggctcaaagaagtcactacacgaagcgaatatcatcgccaacacccccataagtattatttctatcttaaactttttcattttcattagaattttaaattaacgcccattttcactgttttgggttgcattagctttgcattatcaaaaccttgcatattctcagcataagaataagagaattcagggtccattcccaaataatcggtgaaggtcaacaggttctcgcctgtcacatatattgttcccgaacggaagaaattccaaagtgttttagagaaagtatagcttaatgtcacattcttcattctcaggtaagatgcatcttccatccagcgagaagagaaatagctgttgcccacaggatctttccatgttgccttcggcatatcggtcttctgtccttctactgtccaacggtttacggctgcaatactttggttgttggtagtagacacagcctccaattgttgtctgacagcattgtatgcgatgttgtcttttgaatatgagaactctgcagaaagagcaaatcctttatatttcaattgtgtatagaaacctccaaagtacgagggagcagcactgccaagaagaatacggtctttatcgtcaatacggttatcgccattctgatctacaaaacgtacatctccggcattataacgacgtccggtacggttactgagatttgcagcgtcagcttcagcttgtgtggaatatactccgtcagcctgataaccgtagaattggtaaggagattctcccacacggttgaccatctgcacaccattatcgtaactcaacacaatttgttcttcaccacccaatgacttgatcttatctctggagcgagtgatgtttccacctacgatccactcgaaattacgagtgcgcaccaatgaagcctgcactgacaactctatacctgtattctccaacttacctacattcgcataataaggaaccgatccataaacggatgaaagaggcatggctgagatcatatcgctgatttgattgttgtaataatcaaaagatacgttcaggcgattgtttaatacagacaaatccaatccgagattcaaagaagcattcttctccggtttcaatgatacgttcggaatattagaacgaacgatggttgacaactgcatgtaaggcactgtagaataatagtatccacccatctgtgaaaagaagcgtgagttacctgtcagtccgtattcggcacgtacattcaacttattgagccatgtagcatcaagaagcggtttccatccttttcccagcaaggttactcctactgacggatatgtatagaaacgagctacatccgtaccggtagaagaagctgcatcaacagctatattcacagatgcctgtaccatattattgtaagtatagtcggcgtgtccgtaaaagtttgtccagttccagctattgatataacccaagaagcgtcttccgtcaatcgtgctgcctaatgtctggtaaaagtcattgccagtgttgcgcccttctcctgcatcatattcgtttttagtagtcatcaactgccatccggctattgcattcaactgatgaacataattgaatgttttcttataacttgcattcaagttggcgaaaaagtttgttgttacagctactccgtcgcttaccgcattatttcgcaaaccatatttatcgcttagcggcactatagtggcttcgcttgctccggggataaagagatgttcgttatcgtaattataatacagacctactgttccggtcagtgtcagttcacggaaagggttgtatgcgataccggctttcatattcagatcatattggcgattgcgagaatccaacgtgttaacgatagctaaaggattgctgacactgtaatctcggctcttgctccgtccatagaaatgcgatgcgtaagtctttaacgtatttccctcgcggtctttttcatatggactcaggaaaggagatcttgcgtaagctgccaatataggattcgtcgtaatatccatgccctgcatctgataatgtccgttcatataagccaaacctaccgttgcaaaaatattcagttgtttattgaccaatacattagcattcaataatgtatgaaaacgttccatacttgtgttatccatcaggccattctcgcggtaataccctaatgataggtcgtacttagcaatattatcaccaccttctactctgaaaagatgatcggtggaagcggtgttcttgtaaatcaaatcctgccaatctgtattattgttatacagatagttgtaacgtggatcattcggattctgcatgaaagggaaattgttatagaagttctgcgggtccttagaaatagtcattcccatatctgccagatactgtttgtagtcatccagtcccatcaccggcatccgcttatcattccagttgattccgtatgatccataatagcttactcgcgtctccaagtcattggatgccgtaccgtctgtttcgatcaagattacaccattggagcccattgaaccatacatggccgcctcagcacctttcaatatagtgatattctgtatatcctgcaaatgataaaactggaagatatcgcgtgtaaagccatcaatcagtgccgaaggtgttttatcgggcatgtggggcacaccgtttatcacaatcaaaggagcgttatcaccagtcaatgtgcggatccctcgcaagttataataactgccttctcccggcataccactactgcgtttcacttgtaaaccggcaacttgtcctgtcaatgcgcgatcaatcttcgtagttcccggcataaaatctttcttagcgatattagtagcagccgtatagtcttccaactgcatttccccttcccgacggaaggggagaatcatagtctcattatatttatattgattttccggaatcaaagtaatcacaatattcgaacgttctctgattagctgtttcacggagaaataccccggagcccatacagaaatctcaccggctttagaaagatccttcacttcaaactggaatgcaccttctttgtttgtaattacattcatcgtattcagtactgtgacaatggcgccttcaaccggctgatttgtcgctgacaaaatcttacctgtcagtttctggcctccttgtccccatgtatttgccaccccacatacgagtagtgcagaaatactaagtattctttttatctttttcatatcctgtttatcaaggttaatacaaatctactgttggacggaaacaccaagtggtgggttccatatcactttttgcacctttcgtaaattcaatcgttacttcaagttcttccgttttgtcaaatatgacaaccccaagatccgtagatccgtcacggtcgtacctgctatctttgtaaagttcgctatatccaccgccactacggtcatgattggaacctttcatggtagaggatggaatagggccgctttcacatttaggaatcttcttgccattcaaataaaaggttgcatttacttgcgaacgagagccgttgaatcccatatagaaattgtatggtccggcaggtattttataaggtacagccgtaaagcctgtagtagaagccttgtcttcaaccagtcgatagcatttgaatttaaaaattcctggtcggtcagtatccacaacccacaacatcatagatctacaataaacagccggcagccacggtttgggctgattagcacctacatattgttttacacggttcatttgtacgttctcaccaatatctttcagataagtactgatgtaattatatccgggataatagtactttttatcttcatccgtcaattggtcaaacgtttcaaaacgttccttgattctccatatcaatatcttgttggtcggtattttcagtgaagttatcttataagcaacgccgttactcaactctaccggattatcaagatctaccttatttactgttgtacgccattgttggtcaaaaacagaatagaagtcctgcgttgaagtcggatcactttcattataaataaagtcttgttttacatactttttactaaagaaagctgtctggaatatccagttgttcaaaatagagtcttcacgttccatattccacgatttcaacttctcttttgcttctttcaacgcattttctatcaagtcattagatggtaccagcaatgtagcggtaatgttctctgaataaagatctaacttcttatctgcaaaatactgactcttttctgtgaatacagagtcatataccgtatttcctgttttatcaattcctataggtgtacttgcagctttatcaaatactctttgtgtacggctcaataccatttccttaaaaatagagtattcttcatccggcaaatctttcagatattccattaatgccttaggagtattgatataatcttccaaatcataaatgtaggcattgttagttttaatcacctttttcaccttcgaaccattgaaataaattcccggttccatgccatccacaggctcatcgtagattcttacagtcacatacttaccgttccacatcaacagacgctgtccatcttccagattactgggtgaaagaagagcatcagtaatgtgtgcttccgccttaaatatctcttcagcggttgcttgtccttcgctaccttctgcttttgtaacaggttggttggcattagcggtagattcattacccaccaccataatagtatacatcaggtttttctcctgccaagttttaatcacgcctgttttatcaaacagttcatacattttactataatcctgagcagtctttaaaaagtcggctgccgactcatccaccgcttgaatctccgtgttgtcaatcaccgtttcccacttggaataatgcgaatcccaagtatccgtacaggcgcagagtccaatcgaaaccaaagctgatgctatgatatatctaattttcttcatggttgttattctattacaggttcaaacaatatataatcaaaatacatacggaatttattatgcgagctggctgcaggatctaccacaactacattcaatgtgtgagaagcagtcgttgtaaattcaaacgcagtttcctctccgctcaaattggatgttaacggtgtattgaaacaatcttgtacatctcccgtctttccatcgtaaatacgtttgttatcaccacctgccagtcgtttagaatctaatctaaaattggtcaaaccagcttgactcccttctcctctttcaccgataaacttcatagacggatcgtatgcgtaatacaaagtaattctatactttccggctaaaatgggaggaatagtcaaatctaatgtaccgttgtatcctatattgaccaccaaggcatcattgttcatcaacttagtccagttgcccgaagtgttagcacctttggtgcaatatgacaaataactccagtcgcttgccaacgtaccgctaggtcccatttctattttgtaggatgaaacttgtggaacgatctcttgtctgccgatgaatttcgttaatgcagtgtacgtatcatcatcgtcacgtgaaacctgctgataaagttgtccttttcctttagcagcaatgtatgaagatacttcgggataatcacagaaatcaaaaataacaggtattggttcaaaatcggttttcactggcagatatccgtcaattggttggatatatccgtttttcacaatctcgtcagcttgttcctctatgaatttaactccattatttaatccgttttcagaaatcaagatcaagtcgtttgtagctctggtattcaacatctttctatattcccatgtttctctgtcaaaaggtttggagaatgtgcgaagagattcaagagtatgttctccatccattatatggtaagctataaacctgttcaactcattattgggaagttcataatcgtcggtcaatgctccaaccttggcagccaaagcactaaagctggtgataccttcctgtgcaaatacagcatcggatacggcaaatactgtgaaatatttacgcaattctactctcatgcctaacggaccttcgagttcggaattcacaacactcagcgaatcgctccatgctgttttctccaacgcttcacagaatatcttataattacccttgtctgaaagacgtgcgtagatagtctctactgccggactcaacacatcatcaagcacatatatacgcccattggctgtgcgtatagctaattcgctaacatgagcttctttgttaatgtaaacagatttatcgccaccttcgttaccgaaagatactttcaatgcatctcccgaaagtgttctgccaggcagttcaccgcttttcacaaaatcctcccgatcaatggagtcattgatgacatgatatgtaacaagagtgcgggcatattcatatcccaaatcttcgatagaagtgactcccttcttttcataaaagcggagaactgcatcgttagtaggtgccaacacagtgaaagcatcctctgcacgatttacagcgttgaacaaatctccatatttcaacactttcacccattcggagaaatcgtcaggacggttctggagataggttgccgcaggttgtacatcatatactttaaataccgtatccttgtacggatcatcacaggaataacaagtgatgcacaaaatcattaagcaaaatcttacaatattcttcatagtatatattaatttgcagttacatcataataaggattctgtattaaattcgggttactgtcgatctcaccctgactaataggcaaataccaagcatcggtattcttcagtaccgaacgtatccaactggcgctaaccgtagaattgttctcaatgatcatattgataaactgatctttatatttaaagttctgtgacctgccgaagcgtaaaagatcataccagcgttttccttccgcagcaaattcaagatcacgttcctgcaacaagtatccgagcatattttcttgtgatacggcattcgtctgaacacttaatgtagtgacgttggcacgggtacgtattttattgataagttccaaagcttgtgcgaaatttgcttcgccgcctttccagatcaatgcctcagctttcatcagcaatacatctgccatgcgatagagaatccagttggcatctttataagaacgagtcgtagacaatccatcctttccgccgattctgaacttaaagggaagatagccttctgtattggagttaccaataacggttcccgaagaaagaacaaacgtattgccataaccacgaacagtgttggaagtcacccattgatcagtttgttcgtcaaacaaacgcttacacattgcgttcgagaattgaagactggcaactgtcgattgtgtccaaggataaacgttagatggcgaaggatatgtactcgctgtagcatcatcgtcaggagattgattgcgtgactgatcaaagtttagttcaaatatagaaccgttgctgttgcccgggaagaagatattgtaccattgttcggggtcttccacaaatgccggacggaaagcggaagttgaattaatcagcatatctgcatatcttacacaaccatcgtaatcttcgctccacaaacacacgtctgccatcaatgcatacagtgcccatacagtgacgcgtcctttactcatgccggtccagtcttcatcatcatacatttctttagctgctcctgtggaaagtgcattctcgatatccagcttgatttgtgcgataatcgtctcttccgaagatttgggtatatcgacagcatactcgtctgtcatatagggttccagaatcaacggcacttctttaaagttacgtaccagcgtaaagtatgtccaagcgcgcataaaatatgcttccgccatatttgaattcattactgcctcatgatatgtttcatcctgcctctttacttccggtgcatatttaattatggagttcgccacattcaatatagaatagaaacctccccatttgcattcgccggatgaagaattcaactgaaaattctgtaattcctgtttcgatttacctgaataagcataaatggatgccccgcgaagttcgccccaataaattaatgtaggaaccgtcagacgcatgttttgatatccttgtgctagtacctcttccacctgctcttttgttttccagtattccggagatacctgttcgttcttaggcagtacgtctagccaatcattacaactggaagtcagcaaagttgctccggccattgctatgtatattaataatttcttcattttgttatcgtattagaaacttaagttaaaaccaaaagtatatcgtctggacacaggtgtcgttgcaccgtccgtagccaggtctgtcggtctcgacggtaggtttacttccggatcctgaccggtgtaagaagaccaagtaaacaggttgtatcctgtaacgaaacatgtcagtgaagtgatacccaatttattgcaaatgcttttcggaaatgcataattcagtgtcaactgtttcaaacgaaggaaggaagtatcttccacaaaacgatcagaacctaaatagttgaatccttcgccatacaatgcacgcggtatatctgtaatatcaccttcgttcttccatcttctcaacacagccgtactctgattggcgttaccgtgcatggactcattattcatacgagccgtattcacgactgactgtccgaaacgtccgtggaagaaagtattgatagaaaattgtttatacttgacagtcaatcccgcaccaccagtcaatgtcggattggcattacccaaatagacaatatcatattgattgataacaccgtcatgattgatatcttcgtacatcgcatctcccggctgacaggtagctgtcaggtttttcattacgattggtctaccttttgcatcattcattacatttccttcagcatcacgtgcatatgttgcatcggtgttttgatatactcccttgtaacggtatccatagaacgaaccgatagggcgtccaacttccgcacgggcagcatatgccccattctttggtgaataattctcctgtaccatattggcaggtagctcagtaatcttattttcgttgcggctaaagttcacataaccgttgatacgccagtctttattctcaaagattacgacatctgtacggaactcccaacctttgttctccattttacctgaattaaaataactaatcgatccgaaactagtggttgaaggtagtttgtagttcttttgcagcaaatctttcaccgtcttataataataatcgaatgtaaatcttaaacgaccttttaatacggaagcatccagaccataattatattcggtagaggtttcccatttcaaattatccaactgcatacgagcctgctttgtagccgacatgttcatatagtctgttcctttcacgtaggcgcccagataaacagaagcaccgctgggagcacgtccactctgcccgatactgaaacggaatttcgcttcgtccagccatttatctcttgctttttccagtaaaggctcgttctggaagttccatgcaagacctacagcagggaaataacccattctttcattacgtcccatagcagagttaccttcagcattaagagatccgtgtaccacataacgattcagcaatgtatagttcaatacccctacaaaagatacattacgtgtttccgattcgcttgaattcatgtcactaatagtagttccgactaccggatcggagagatcggaagaagcattaccgtatacttcgctattatagcctgaattgatatactgaccggtacgaaccaatacattcgcaataatattatgtttgtcattccagttcttgatatacatcaacttattctctgtctgcaaagccaattgatcggaataagcgtccgcactctgattggcatatttgttgacttgttccactcctgttacaacttgtggcagaaagcgacgtgttttaattgcacgcatattgatagaagcccaacctttataataaaatcccggtaaaatctcataatcggcacggaatgttatcttaccttcacgctgcacagttctgttgatagcttcatgtgccatagcaacaggattataattactttttccattaaacgaaccttcaaaattaggatcgtggtaagtaaagtattcatcagtcaatgcacctgtcaagtcatttacagtaaatggcgatttgttcggcattttactcaatgcttccgagcgaatagtgtttgtccagttcgcatccgtattggtctgcgaataagaaaagtctgcgccgaatttcaacttattagagaactgatagttaatgaccatagaagtatttaaacggttcatagacgtaccgatagtagtaccgatatcactcatatatcctaacgagaaacgataagttgctttttcaccaccaccattcattgaaaaactgttatcagaaaccaatgctttttggcgtacataatccaaccaattagtattttgattatactcatcataatatctccagtccggattgtcaccgattgcaggagcatcagacaacatattgaggtatttatttcccggattattcagaccgatgtatttggcagaattccagatagattcctgcataagagaagtatattccttaccattcaacatcgggatagtactcggatcttccttcattgtccatttggaggagaatgagaaacgagttttaccaaccgtaccttgttttgtcttaataaccaatacgccattggcaccctgagtaccccaaatagcagtagctgatgcatcttttaatacttcaactgaagcaatatcattaggtgagatatttaaaagagcacccaaatcttcttccgtagctgtgctgaaattgaaatcatcactgatttcagtcggataaggcacaccatcaataacaatcaacggatcggaagatgcatttaacgtacttgtaccacggattctgatagcactacggctaccggggtctccacccaatacaatatccacaccacccaattgtccttgcagcgcttcctctatagatacaacaggtgcagcggcaatcaacttttccatatcaactttctgagtagccgaaaccatttctttatccgaaatacccaaatcatttctatttaaccgacgggccgaaactactacttcatccaccgccattgattctgactccaaagtcacattgagcagagtttgccctgtatactttatacgctttgttttcattccgatataggaataaacaattgtcagatctttctctccctctgggactttcacattatattgcccgttcaggtttgtgataccaccacccaacgaacggttctggttgtttactagattgacatttacaccaaccagtggttcagcagtttttccaaacaattcggtaaccgtaccggatataaccttctgtacctgccctgccatttctatagaacaggacagaaaaatggctaccaatgtataaaagactttatttgtctgattcatgattaattagatattcagttaattaaaaacagcgtctatcaggtggaaagcaccgtccataaaagcaaatgggaaattctcgtatgatactatcttacatgcatttccgtactgaccggtggtctggttctgcaactgcaaggtgatgaaagcgccgttatcagtatacttcacaggaatattattgctgttacgatattctcccgatagccagtcaggtgatccgagatacggacagcctgatgcaaccggagcattggtaggcgtaaagaaataattgagcagatattctcgtaataagtattgatttgtaatctctccttgaagagttggtgatggcagacttaaatctatcgtacctttcactcccggaatacgatcattatccaaagcctcttttagtgcttcatttgtcggaatgaacccgataagacgtcctgccaatctgtaatcccaagcaagtacaccgtctatagtagcaaacagttcggcttgtctcattaaataggcgaatacaaaattcggatatttcgtttctccaatagaggtcaacattgtcctcaggcttgtatattccaatccatccaatttcccgaatacaccgaagtcactttcatattcatatactttaccgtttgcccaagatcctccggcatcattggtcacctcttttacttcggtgaaaagtgtaggaataacagtttgcggatcttgacctaatacactgttaaacacatagttcgttgtcattttcccatctttcacaaaccaatatgttccaccatcctgagtagcataaacagcccaaggcgtattaaagttaacatctcctactacagttccaccactgacgattcttttcaggtccgaagttgaaacagccacatcaccatcttctccggatgttgccagtgtattaccgactccatcagacatcagacgcatgtcactgatttcatatccgctatttttagtgatcaacatcgtatagtttgtagcagtggtagtgtacgcagccatctgattactctgaaagatagcatacaacgaaagcaggtaatctcttttaaggaaagacggtcccatcacggtactgaatatttcaggcatcgggaaattgcttaatccataaaaactaccgttcacacagatactcttatctttcacatcgctcaactggaaatcataatgcgaacccaaagagttggtaattccgctaatttcgtcagggaaaacgatagaacctccatatactgattgataaagcaatatcttagtaatcaacgggtccaaatcagttaaagaagaatatcctccagctttccaatatctattgaagaaagtgttgagtgcctggttggacggtgcaaagatactataggagatagaagctaattccggataaagacggaagttaggtgtcggccattccaacgcgatattcggaagcccgtttggtgaatgtgcatgcagaaaaagactatctactcctactgcttttccataatcggcagacaagtccttatcataggcataagtactgtactggctataaaagtcgaggaaatcggaataatctgattttttctttaaaacatcataaatagtttccaatggttccaacaccctgtctacattatatatatagccgttattggttatgatttggtattctttaacacttgcattcgacacattgaacccgttatctcccgtccacgtagagttaggatagaaaaattcataattcttcttggcatctatacctttagaggcaaagatgtggtgagagaatacaggcaagaaccgctctaaatgatagacggttacagtattgtttgttgatggatccacttcctttgtaataggactggtgctgtgtgtacgaaacttgtaatacattcccggttgtaaaactcccaattcatcatcgtcatcatcgtctttgcttgttgcactgtcttccgggcggaagttttcaagatcactcttgctataagagtagtagattaaatgataaccaatcagtttcttcaaatcatctgtcggtatatccttcactgaaacataaccgtgttcttccagataagcagcaaacgcatcattgtccggagccatgacagttgcgacactcttaccatcaagaataggcttaaagcctgataactctgccgcttctagaaacatggagaacttacctccatattcattagaaagaacttcccaagctgtacctttcagccattcgggtttttcataatgctcatccatcttgtcctcacaagagagaaaaaaaggtgagaggagcaataatagcagccaatgccgcttacgattcatcacatttctcataatattaaaatctgttaagtaacaatataaatctattttatctattttttaattaaacaaaagttagattctgtttttcttcgggcactttatcataatacctgtgaaaaactgttgcaaacttaacgacttatataagaaatagcaatgaagaatcgtacataaacatggaaaataccgccttttgaacgaaaatacatgctctgaacgcgttttttaaataagaaagagtgtagataatacaatttattccggtttttcttgaaacaagaataaccatatataaaagcaatatggcaaacttttcaaatataattgtgtcgacaaagaagttgacaaattaaaaatatatgcgataaacacaaattcatgtttgcgaagtacaatcaagaactataaagattattttgccattcttattgtcacttgtcacttttacaacttaaacaattgattatcagagtaataagagtgacaatagacagtgacaatagagtgacaatagagtgacaatagaaataataaagctttctattgtcacttttactttttcctcttttatatcttaaccaccagatacacagtccctttattcgtatgtttgcaaggaatcccctctttctgaagcagccgtccaaagtgatgcgccttgccggaagacagcgtaatggtcgttcttttttgcagataatccaatatttctaccggagataagtattctccttccttatcatcccctgcaaccttgaaataacgatagaataactgaatagccggcggagtctgttcaaactcccgattcccctgtgccaggatagcctcatccttatcgtcaaaccaataccgctcgccatgacaaatctcgtacatagcctgtgcatacaactgctcatagtcaatcgggcgtgccgtatcaatcgtacccgtcacctcaacgcacataaaacgacggctaccggacggatcagtcagcaaatccttctgattgctggtcgcgataaacgaagcataacgccgcaactcctgcaccgaattactgtacgatttacgaagattgactaccggcttttgcagaatatgcttcaaaaagccctgctgcgtcaaagtaatctgatcgaactcgtcaatattgatcagcgcaaagcgattcagatacatttccgcatcccgcttccggctgaaatcaatactatccgtataatatccgcgaagtcccggcggtatcagatcccggcaaaaggtagacttgcgtgtcccctgcgcacctaccagcaaaggggaagtactgttcgcatgctgccggtcatacccacgccaatgagctaccatgttgaggaaccagcgatggaaaagcatcgtccaatgcggattagcacatggcacacggtctgccagttccgtaatgcggtcttttttatcccaattaggaagatgaaaaataaattcttccaatggattataaacagatactcggtttgaatgcagataacggtccacatcccggtcccacaccgcaataccctcactttgcgcatccagcagaatactattctgcgcccgtttatccaacggacggaaacgaaaataaaacgagcatcgttcccggtattccacttcacctatctgtgtattgtagcggaattcataacgacggttcataaactcctctgtctgcatattgagatattgctcttttgtcagcccgtttttcttgccgaagcctttgcattcctgatacacattgcctatcatctcgcgaaccagcacagcctgcttcgaatgataataccgatgaatggtcctcctcaccacttcctcttccggaataccggaaaggaaacaattttccgccaaccggactaccaggggctgcaaatcatcattccgcctccacccctcttccatcgactgaaaagtctttcgcaaggcagcctcatacatcaatgccagcgcatcttccgtatcatatcccggaacggcacgattcaacggagacttttccggggtcagcttctcctgataattcatttctttcggcatcccgaaaggctgagaaagataaaacggcacggaattttcccgatagaaaggttcgggatcgtgactcagccgtgaatattgctccaaaaccggctctttcaactgaatatcaaaggggatttgcggctgatagcatttcaccgccaaacgatacgcatgtgcctgaaaaatttcagcttcttcctgcgtctgcggcaacgtaccgtccggacgggtaaaaagagtccatatcttcacggaatttccactcgcccccatgtatgcaaacatggtctgcggcaattcagccgcttttttcttgaccagatccacttctacttttcccgccaacggacctacggtcagttccacgatgccattatatactttcatccgcttcacgccatttacacgtccgaaaacggcagcgggtattactttgggaagttttccggcaaaactgcaagattctccgggtaaaacaaaatgcagggcttggcgcaatccggtcaccggacgggtcttaatctctgtttttatcttctctatcaacaagttaaaatctaatacacttaatgcttcgactccatctttctccctgatctgtgttatcttcattacttttctttaatatttatgtatatccctcaaaggtaggcataaaacagacagcaaacaacctttctattcattattattacagaatatttatccgcctttccattcttccggaagctccttgaattaatagtaaataaaacgttcattaagttgtttagaagcttagattaatgtatctttgtagtgataagaaatcgttttacgtacatggtcccatcggtccacgtatgtgaactattgggtttacgtacatagtccgaacggttcacgtacgtggaacgaaaacgtgaaacagacaaaatatattagtcgagccttgtctacatgttaaggttactagtgtttgtactaacacacgcggtatcaattgagtaacaatcctattaaccaacaaaaaacaagtgacgctatggcagcagattatgactttcggcgaaaaccgaatgaaaagggagacggagaagtacagcctctgtatccccgaattgtatccaaaggaaccattgacagcaaacggttatttcgtgaaatagccgaagcctcttctttcaccgagggagatttggcaggtatcatggtagcttttcaagagaaggtatcctattatttaagtgaggggtatcatgtgaaactgggagaaatcggatatttctcctctagtttgaaagcacgtccggtgatggacaagaaagagatccgttcggtctctatctctttcgacaacgtaaatttcagagccactccctggtttcgccgacgcagttcgggtacggtgacccgtgccaaattcggatttcaagaatcatcgaacttgccggaagagacacgccgttcccgactggaagcctttttagcaaagaatcacttcatcactcgaagagaatactctcagattacgggtttattgaagggaaaagcactacgggaattgaatcttctggtagaaaacggagttcttaacactcgcggatatgggaaccgggtggtgtatttaaagcctaataatcagtagattaaatcagtaaaagatacaataagggtgataatagaaaagaggttactattctattatcaccctattatcaccatctattgtcacccgtttttcattgataatgaaccggttagttctacaaagtgacaagtgacattaaaaagtatcattaaactccagtgtgtgacgctcaataacttctaccgaatcgagcccaagcatatagtcacctttggtcgcctcaatcatagctttttgttctttctgaaagtagacaggggcatctttacgtaaaggtaaaatctttagttccacctttttgccgacgagatctgccatacggacccacatctcctttccattccagaagttatctgctacaagcctgccgtcagcatacacacgggccacatcaccccgataatttatacggagaaaaagattatcataattatttattccagatgtatcatagttaatagtgtataccgcagcttttgcaaagtcctcttctacaggttgcgcagccactgcctgacgacccatggggacaacacggggagcatccgcttttttcacttccgtgactgtggcggcaatgacaggagactttgtccatacctcctccacgatgcatgaatcactcttatacagaataccgccattcttggcataaagcagtttaccgtcaattttataggcagtctttgccttttcgtatgagagcacacagacattgagcttgcccgccttctgctgcttgttaagtttacaagtatagaccttgccgtcaacggagatttgaggctttttacccctgatttcgatgaaatagataaggtcatccactttgcagaacggttctacagtagtccagtcaatggttgcaccctcagtccgatagtctttaaaagtgacatgggacgtcccgctctcattcttgatacgcacatagtcattatagaattcgaaagcaccccggcgggcataatgcctgcttaatgagtcaacattcatctgcaagagttcactgccccagtctgtcaacatctgatggataaaacgtccttcatgaaagggagtctcgaatacttgtcccacttcgccaagaggagcctgaaaatcataggtcatatgaggcaggtcattatgattagtacccggagaggcttgcgtttctcccatagtgtgaagaggattgtatggattggtgccaccatgatacatatagtatcccggaagattggagccactacccagcttgcatataaccagcggtttaagctcccttccattgatatttatccgacgatgatacgccggcatcataccaccgcccaactcacaagtaaagtagggatatgacaattttgaactgagagagggggaatcttccgacaattcctccttagagaatgtctctgtggcaatagcactactcatgcgtttgtctctcataatgaaagcatcggcataactgcccggcatatcctccagtttccggtcccagaatccgtcggcatagtcaccataaagcggcaacagctgcccgaaaatctcttttccccgaagcgcaggccaaccggtacgtgtatagaacgggacatcaaatcccgccttcacagcaatatttttcaatgcctccagataatcccaaggaccgcgactttcgttctcgatctgcacgccgaccacaggaccgccatctttccacaaaagtccgttaacctgagcaaaaatagtattataaagctccgtacaatcttcaaggaatccgggagtacgggcacgtatcttatacttaggattctgcccggctttctcatgtacccatgaaggaattccgccttgatacacttccccatgacagaaaggaccaagacgcaacaccagcatcacattttcttctgcacaaatccggacgaagcggcgcaggttatgattgccgctccagttccattttccctcttccggttcatggtgaatccagaagatatatgtagaaatgatattgataccaccggccttcattttgtggatttcccggcgccattccgactccggtacgcgggaatagtgaatctcgcccatgacgggaatgatatgcttgccgtcaaggataagccccttgctatccaccagaagagttttgccttcgggtgttgcagatgtcccaaaccggaaagtaccttgtgctgaaaccattgacaacgacagtacaaacatcaataaaaatgtgatcttctttttcatggtaatctttcaattgttagtctttcaattattcaactaccttccgattcaaacggaaagtagagagaactttcttgccggaataaatagtcacaaggaagttatagtcctcacctttttcaaaatcagcctttgtcgcaaagcggatgtcagctttttcatagggtttcaaagcaggtacggcagcagaagccactttgaccattttgccttctttcttatactctatcttgaccgaagccttttgtgagctaacttgtccgaagttctgtacttcaatattcccgttccagcctttttgcgattcagagaatacaggggcacgtgcagaaagaatcggttccacataatcaacatacggcaaacgcgcatatccgtaaagcatctttccgtttttatatctgcctatcaatttaggagcaaattctttctctgtaatcccatttccttttccgtcgaaagtaatgatcaggtcatttccatcattctctgttttcaatactttacttcctctgccataattcacttcttcggaagcgccaaaacgcaaagagctgatatccatatcggtttgtggatgaaaaccttcttctgcctgtactttcagccggatagttttcgttccagcggtaatgggcttatcattcaacactgtcagcaatagtcccggattcaatggaatactgatattctttgaactgtgattatcaaatggcttatcttcatgtttcaaagtatcaatgaccgcaaaattagcctgaatagcacggccatacttatcttgatacattttcagacgttcatacttgaaccagccttcagaatgtccgtcctcgtgtacggcaactcccggcatgtaggcctctcccggatcagtaacccaattgactccgtcctttgaacgaagataaaaggcaatacggcccaaccagtcattgacaatcagatgatactggatatgatcgcgccagatgacagggtcttcaaaccgtcctttcacatccggataaacacgacggtctgtcaattggttatattccgacaaaccatcccggctgatccagattccaccgccacgacagaccattacatatgaactgtcttcccgttgggcaaacgaaagattggacaatccttcgatgattctacgatcgcgcgcattgaagtcgaattttccatattcccattttccgttgatatcatccgcaacataacgtccgtctatgacatacaaaacatatcgcccgtcttttgcctgaaacatctccggattatgtccttttccgatgatattaaccggtttgaacggaccggtcagattatcactcacggtattgaacacccatgaatttctccactccatatgtcctttaggagaggcttccagccatccgcaaaccatcagatgatatttaccgtcttctcctttccggatatttccaccccaataggaccagatacggtcttcaataccattatcaacataacgcggacgcacatcggaggttccccacgtgtcggatgacagttgattgcctttcatcggcagaaaacgatccataaaccgggcacctttcaccagttgactccactccttgggccgttcgcgttctgttacttgagagaaagtggatttactcacaagtagcaacattaccattaatactaatttaagattttttccgtacatgtttttcttctgttagttagtttgatagttcgtttgattaatactattagtattacgacaaaagtaaatcaatccctcattagtgaatgataacaaaccagggaaaaaggcacgtaatgctttacgtaaataatacgaacattcccagagtcctaatagcccaaccaaacggttgataccaacaactgaatgcaaaatactcttttattcatcatagtaaataacactattttcttccaaactaatattgcagcagaaaactctcggcaacttttagaaaacggtcatgtcctttactgttcagatgcgctgtatcagtattattcttgcttttctggaaatagattcttctgaaagtatcattatcggcatagatgcttccttttcttgcgcaatcaaaaataggaatactataattgccgcagacttcaatcattgcatccactactttttccgagtcacttcctttaaagttcttgcagttccagcgggtaaagaaaaagattttcgctgtcggatatttctcgactaagcctttgcacagaatttccattttatccttgaagttatcaatacctccgatagaatccagtttaaatgcatcattatgtccgccaatgacaatgacataatcgaggctatccgccatctccgcatatcgcagatacatcgcttttccccatcgcgggctggaataagctatgctattcccattctttccataattaaaatactccataccgtgcttctttgcaaacttataatgccatgtgttctcaaacggctctttatgatttctcacatagctgtcacctattactccgatccgcttgccgttaagttcgtcagtaagcgctataccagtctgtgctttcccatccaaaacggacaacgcacaaacgattaacaataaaaagatttttaaatgtgtcatcactttatgtatttttcatttgctagcaaagataagggcagttgtaatgtcagtacatgtaaattcatacgttttcctttaaattcatacacttttcatgctttaatccggttttttacgccccaattctccaagaaacggatgattttccatctttctatacttatttgccattggagcaagttacgactttgcatatctttgccaagaaagttatccatttctacaaaagactacaaacgtatgaaaaaacatctgattgcctggggcattttatctaccatgtttatggcaaatacttttgcccagaaagacatcgaccgtcctattatgggatggagttcatggaacacctatcatgtaaatatcagtgaagagttgataaaacagcaagctgacgcattaatcaaacacggactgaaagaggcaggctacaactatatcaatatagatgacggcttcttcgggcatcgggacgaaacggggaaaatgcatccgcatcccgaccgttttcccaacgggatgaaagtggtttcagactatatccattcgctgggattaaaagccggaatttactcggatgcaggagacaacacctgcggatctatctacgacaacgacgcaaacggagtgggctccggactatacggccatgaacagcaggatatggatttatatctcaaagaatggaactatgattttatcaagatcgattattgtggcggacgcgaactggggctggatgaagaaaagcgctacagcacgatttgccaggctattgccaatacaggaagaacggatgtatctatcaatatctgccgatgggcttttcccggcacctgggcaaaacgactggcacgttcctggcgtatcagtcctgatatccgtcccagatggaattcagtaaaaggtattatagaaaagaacttatatctttccgcctatgctaccgacggacattacaacgacatggatatgctagaaatcggacgtggactgaaacccaacgaagaagaagtccattttggaatgtggtgcatcatgagttctcccctgctgatcggatgtgacatgaatacgattcccgacttctcattgaagctactgaaaaacaaagaactgatcgcactgaatcaggatgtattaggacttcaggcacacgtcgttcaacatgagaatgaaagctatgtactggtaaaggacattgaacggaaacgcggactgacaagagcggtagcattgtataacccttccgaccagccatgtgactttatcgttccttttgaaacccttgaactgggtggtaacgtaaaagtacgggacttaatcaaacagaaggatcttggaaaaatgaaaggagaaatacggcagactgttcagccacacagcgtaatgatatgcaaaatggaagctgaaaaacgactggaacccgtatcttatgaggctgaatgggcatatcttccctgctacgacgatctgggaaagaaatccaaaccaattgtttatgtacctgcccccgattgttccggcagaatgaaaatatcccgactcggcggccgggaagagaactttgccgaatggagcgaagtatacagcgaaaagggaggtaactatgaaatgactattttctactcttgcgacaaaaaccgcaaactggaagtttctgtcaatggaacgaaaacagtactcaaagatttgaacagtaacaatgaagtgaaatctgtgactatccctgtcagcttaaaacaaggttacaatacggtgcaaatgggaaataacttcggatgggcaccggacatagaccgttttacagtatccagacaataaattcctcataatatcaattatagaatgaacaagaaatttagatgcttactggtatctctgattttcacagcaatgtggaatgggactaccatacaagcacaagctccccatcccgaacgcatttatctttcgggaacaggcattgacaacaccaagacctgggattttttctgttctgcgggacagaatagtggcaaatggaaaaagatcgaggttccctgtaactgggaactacagggattcggagaatatacctacggtagatggtataccataaaaggacaacaccccagtgatgaaaccggaacttaccgctataaattcgacgcccccaaatcatgggcagggcaacgggtaaagatattctttgacggagtgatgactgatgcagaaatcatgataaacggcaagccggcaggtgagatgcatcaaggaggcttctatcgcttcaattatgatattaccgaattactcaatcttggtaaaaagaatcagcttgaagtgaaagttgccaaagaatcagccaacagatcgatcaatgccgccgaacggaaagctgactggtggttgtttggcggtatataccgtcctgtatggctggaagtcctgccacagatacacatggaacatttcgtactaaatgctgatcatcaaggaaaattacaggccgccgtagatatggcaggagatgccaaaggacatgaaatcatcgtatctgtccgttcattaaaagacgggaaaaccgtatatacctccaacggacaaacaacaatcactcattcaatcagtaactccgataaggagcagatgattagcggtgaatgggcaagcatcattccctggtctacagagaatcccaatctgtatgtagccaaattggaattaaagaatcccgaaggtaaaatcgtacaaaccagagaaacacgcattggtttccgtaccgtagagttctttccccaggacggcgtatatttgaacggtaccaaactagtggtcaaaggaatcaatcgccactcattttctgtagacggagggcgtaccaccagtgctgcattaagccgaatggatgccctgctcatcaaagaaatgaatatgaatgctgtacgttcgcactacccgcccgatgaacattttcttgatatgtgcgactcactgggacttgtctacatggatgaactggcaggctggcaaaacggttacgactccagagtcggagcaaaactcgtaaaggagatgattgaacgagacgttaaccacccctgcatcattctttggagtaacggaaacgaaggcggctggaatacgcaaaccgatcctttatttgcccaatatgacagattacagaaacgccacatggtacacccctgggctgactttaacgacttggatacacatcattatcctacttatctgacaggcgtagcacgtttcaccaatggttataaagtattcatgccgaccgaatttatgcacgccatgtacgatcagggaggaggagccggcctgcgcgacttttgggatcgctggtgtaccaatcccttgtttgcaggagggttcatctgggtatattgcgatgaggctcccaaacgcagtgataaaggaggaatactcgactctgacaagtccaatgcacccgacggagtagtaggaccacgtcgagagaaagaaggaagctattatgccatccgtgcacaatggtcgcctatccagttgaaacctcttctcattactaaccacttcgacggccgtttcctcctgaccaatgaatatacttttaccaatctgaaagattgtcgtatgacttataaggttttatcatgcggcactcctctccagggaaacgcagaagcaggaaaggtgattgccgaaggaaaagtccaacttccatccatcaatccgggagaaacaggcactgcccgttttgaactgcccgattcattccgggaaggggatgtgctagaactggaggcttttgataaagaaggaaaaagtatctgcaactggacttatccgattcatctggcaaaacaatattttgaacgtaacctggcgcaaacgacactcactcctgctcctcaaaaagcagaagcccgacaaacgtctgacgccatcgaactaaaaagcagcaaagtcagcataaccttcgatgcggcgaccggtatgatccgtcacattaaatccggtgagactgaggttccattcaaagatggtccggtagcaataggtatgaagatgcgatatgaaccttcgctcagctatactcgtcattcctccgacggcgccatttattgtgccaaatataaaggtgcggcagattccattgtctggcgtctgacaaacgaaggtttgctctatatggatgcaatcttattaaatcgcggttccggtggcggtggcttcgacgatgctttcatggatgcacaggttttcaatctcggacttagcttctcttatccggaacaaaactgttcgggtatgaaatggatgggacgcgggccatacagggtatggaaaaaccgaataccaggaacgaactacggtatctggcacaaagattataacaacaccattaccggagaaagttttgagaatctgatatatccggagttcaagggctaccatgccaacctctattgggctacactggagggcgagaagacttcatttaccgtttattcgcgtaatgacggtactttcttccgggtattcactccggaagaaccggcagggcgggtaaaagataccatgcctgcattccctgaaggtgatctttcatttttgcttgatattccggctatctgctcgttcaagccgatcgagcaacaaggtcctaacagtcaaccgggaaatatccgaatcaaatcgggagatgaaggattacatctgaatctgatgtttgacttccggtaatcctgagtaaaaacactttaaaataaagataaaacgatgaactgaaaattgttcttggaacttaagtttgttagcgttgtatctatagcatataaataaggggctatttgattaaaacagccccttatttattatttcatttattacttagtcatcatcttcttttccgcactcttcaatcctttcagagaagccttgatcttcacatttccactagtctgactggaacgtaatatagccattacaaatccttgatgtaacttcttgtggtttcctgagaaaagctcatccgtcatatgatcaccattatctacggcaatcagtctggcttcacctgagacttcaaacgtaacttcaccttcagtagcaggtaccacccgtcctttactgtcaacagcatatacctttacatactgcaaatccattccatctgctttccagtctgcattctccaactccattttcaaagctttcgccttacctgtcgtttccaacatatgacgagcaacttcttttccattgttacgtgcaatcgctatgatgtttcctcctttgccataaggtatattttgccagtaaatcatattgcggctttgtatatcatcacgtttattcttctgaatacctaaagatttcccattaaccaataactccacttcatcagcatttgtataagtgaacagattctgcttacttccttcagctctgttccaatgagatgaaagaggcatacgacctactatgacatcattccattcaatactttctttctcactatcgactactccgatatgaactaaaggctcatcactgaaagcactctttatcaaatacgcttgaggatagggttccaaagcatgattaaagaatgaataattccacccttttttaggccagccgttcgattctccccagtattcgatagctccccaataggcaagtcctaccatcttatcccggtccataccgaaaaaaggagcagtaagttcactacttgttgcttcactctgataaacgattaaatcgggacaagcttcgagatacttcgcataatcggtatattgataattgaagctggcaacttcagtcaccgtagacaattcgggaggaagaattttcttattgaaatccgcatcttttctgctgatggcaccagccctcgatggatacatagccaccgttgtctttcgggtagaatcgtatcgctttacaagcacatcgaaaattcgataagtcgtaacaccccaatcgccggtaggaaatccagccagatcttcccgcatctgcaattcgttgccgatactccacataataaccgaaggatggtttctgtcgcgcttaatccattcgggaatcatcttataccacaattgagtaaaaggaacccggccaccccaatatgatttgtcgctccacttatcaatcaattcatctacaatcagaataccatgtttatctgccaactccataaaggatttcgaatatggattatgtgatgtacgcacatgattataaccgaacttcttgagcaattcaaactgccgttcaatagcacggtcgaatgccgctgctcctacagcacctaagtcatgatgattggcaatacccttcaagaatagtttcttaccattcagtttaaagccaaactccggagagtattcaagtgtgcgaataccaaatttctcagtcacgttgtcgatcacttttccatcacggaccaatgttatttctgctctatagagattcggtgtttcacaagaccatagctggggattggaaactgcaactaccggaagcggaacttcaacagtagccagtttattttttttaggagccattccctttgtttccgtcaccaattcacctttcggagaaaagattctggcattgatttccacatccagctgtttcccggaaataccttccacctcaacctgtacattgatatctgcactttgttccgttattttaggagtagaaataaacacgccatgacgggctatggaaacatagtctttaaccagcaaatggacatcccgaaacaaacctcctcccgtataccagcgtgatcctccttttttgccggtagaagcactgacagctaccacattatctgcatcatatcttagtaatttagtaatatccgtttcaaagccaatatacccatagtctgtacttcctactttctgaccgtttacccagacatcacctattaacataattccttcaaaatcgagtaatacccgttttcctttccattcaggatcggctttaaatgttttacgataccaaccggttcccatcgctttaaaaccacgagctccccctgcatccttatcccacggctgttctatttgaaagtcatgaggcagatccagtacacgccagctactatcatcatagtttacagaataggcatctttcaagtcacccgcatgaaatttccatccgaaattaaacaagtgagacaaacgcccctgcccatcagcattttgtgcagcgagcaaaccaaattgaagagtcaataaagataataaaatcagttttttcattttgtgtatattaatagtttcatggtagcacaaagataagcccagtttcaatatcagtacatagaagtttgtacatttacatagattatttatcgtttatcacccgtaaaacaaaaaaagtctcaagtagcgacaaactacctgagacttttgtttgaatatgatcagttactttttatacaagtcagaccctaaataataccccaactgcgtaggttgattatatcctatgttttgattgagggcactcatttcatagacatgatcactcatcagataaggaaatttataatccgtcggataccaagtcgtaaacaggcgcagttcagtctgatcacttgttacctgaataatttcctcacgccagtctccccagatgtccgcatagaaacagggattacttttactactattgatagtagtcacttcatatctataaatagtaaatacacgtttttctttgggcgcatcaatcttactcctgtctaataattgacgattcaatgaattggagaaccatactgccatattgtaagacatactgctggaaccggctccatatccgagatcagctcccgtacaggaatgtgcattgcctttataccaccacatctcgcagcccggactatcgggatcaatatcggctaccaggcaacgtcccatatctccactatacggaaaatcccagattgtctctcccgttctcgcatctctcaaagcagcacctactttaaaaggacaagcctcaaagcaagaccagatttgcagtccttttcttgacgggtcaaacttacccaaatgcaaggcatctccatgtccatgcctggagttccacaagcctttaccattatggtctatacaacaacctccatatacaacttcgtcacatccgtcatcgtctacatctcccacacttaaactatgatttccttgtccggcataatcaccgtgcacaccgtccgaagtatcgaatcgccatctcttctttaactcttggccctgaaaatcccaggcttccaataccatctttccatatactccacgacaaatcagaatagagggggtagtacccgaaaaacatcctactcctacacgataactggcagaacgtttgtaatagttatctccccagtcttcgcttttacctaacgcgatataatcagtacgagccaactctcttcctgtcataccatccaataccgacagaaattccggtccgccatgaatatgagccgagccttcgacacgataatcgactttaccatccccatccgtatcttttatttctgttccatctccaaagacagtaccttctgcggtacgaaccgcaatttcacattttccgtcaccatcaaaatcatagacagcaaaagaggtcagattacccaccgggacattcggccccaaagctacacgccataagaacgaaccatctaatttatatgcttccagcagggtagcatgccaaggtcccatctgtacggctcctgactcatcctcttcgtcctctgtcgaagaactgcttctcaaaagccttttcagtacaatctcataaaccccatctccgtccaggtcaccgacactggcatcattggcatcataataatactctgaactgatgcctgtggtaccggccagcggtatggaaatatagggcagtccggccgatgcctgtgctgccgttatggtataagtatccaacgtttcatcagaaccggcaaaacataaccgatacgtattatccttattacggtcggcagttatatcctggaagtttgtcgacaaagtaatcggttcttcattgagtttcacctcttcttcattaccgctcttccgataaaggtcaaagcctgtagaagaatcatcggtaggaaacatacgccaactcaccaatatcttattattgtattcgggatagtaagaagcatcttttcttccgttaatcgaagcccacaatgcacgtttcaaaggaggctcgacccgctctgccggaggagtcggttcaggttcatcaccattcaactggatttgattgtcagtacacgaaactgtaagcaacaaaattgctgccagaaaaaacaaggcatttttcattttaaaagaatttagttaaacaaataatgatctgtaagttcacaaaaacacatcgctgatctttcaccaagcttccataaaaagtacacaacgccgacacttcgaaaagtgtcctttttatttcagattagtagttcagcgatggtcaaaagtacagaatcatccacattttcaactggaattatgtacagtttacatgtaaaaaaacagggatgaactcaaaaacaaattaaagttcatatatgaacttttttgcttagtctttattatcctccatttgataagttacattcttttctaccacattttcaacattacttactttcttcacaaacttcttaaccgaaccgacctttacatcctttatccgcacatttttcacaggaagttcagcatttcctttcagttcatatacagcgtctgccgattcacaagttactttatccatatagatgccatcgatacgagtgattcgcttttcataagtcgggaccaagtccttccactgataaagtacctccgtatctatttcaagtacccgttgggctgttccggatgctacatttttcatatagatattctctataaatcctcccctgcgatgattggttttcacaaagaaaagacgcatcactgaattaggtgccgtacagtcatgcatatagatattccgtataccaccggagatctcactgccgatgcccagtaaggtatgtcctttcaatatctgacaatgacggatcacgatattctcacaaggggtattcagacgccatgcgtcctgattacgaccggctttgattacaacagcatcatcaccctggtcaaaagaacagtcttctaccaaaaagttacgactcatttcaaagtcaataccatcattattgtgtccatgtgctcgcacatccaaattacggacgatacctccgtcacacatatagaggtgaatggtccaaaacggactctcacgtattttaaatccatccagcatcacattcttacagcgattgaaatgtatcagatgcggacgcaaatgattttcaccggtagccatctgacgttctataacaggtacattggtcgaagctttggtatataattccttcagtgcctccaaatgaggtttagggcgtttgaaccatcctttccatgtacccatcttcggctgtaatgtacctttgccgctgattgccacattttcacattcgaatgcatacagtagcggtgagtaattatagcactccaatccctcccatgaggtcattaccgccggtagatagtcttccggattatctgtaaaactcaatacggcattttcttctaaacagaggtttatattgcttttaaagtgtacgggtcccgtcagccaagtgcctgccggaaccaccacacgtccaccaccggccttattacatgcatcaatagcagcagcgatcgctttggtattatcaacttctccacccggcacagcaccaaaatccgtaatcttaaaatctcggtccggataaataaagactttaatcggttgcatcggaaaaggagcttttactttgacagttttataattaccgcccgccgttaccgtagcaacagacaacagcccgaaacacatacataccatccattttaaaaagttctgtttcattatcatctcatattaaaatttgtccaatcaattttatttttgaattttcagtgtcaccttaatcataccgccatacgggtcgaaatcgaaaagaactttatcgtcagtgatctgtaccggcaattttctttttccttgtttcacagtcactttctttatttccttaccggtaatcaccattgtcaacggttcaacgaacagttcctgatccaatttaagttccggagtaatcaacaaggtattctttttattcacaacttccagtctagtttcctccctttccttgatataagaagccacttcacgaaaggttcctacccatatttcattctctctcgcttttacttgatccagatgatcccacaaacgttgaggattgcggaaagcatcatagccataggttaaaccgtgtgtcattcctactccccagtcattggtttcaatcaaggtattcacccatttctccaaatcctgcagagtcgatttactcccaatcgaacgctggtgagttcttgtccctacacgattctgtacggcaattctccgtccttccgcttttttattattattgggatagcagaaagtacggggcattacacctgtattggcaaatatagcactatcattcttaaaaatatcctcttttatctcttcgataggaaaacgtgcaaagtttttatgcgcccaaccgtgattggaaatctcatgaccattatcagacatttccctaagttgaggccaggtcattcgtgtagtgtcggtaatgttctcgttatccttatttatattggaaccacatatccagaatgttccccggaaacctctcttttccagttggggaacaagaagtgtataatgttctgccaggccatcatcaaaagtataactgatagcacaagccttatcctgtttatatctggcaatttgcacattccagtctgctcccgacaaatagccaatactgattaataaactaaagataaagagtgaaaatgtcttcatcgttctgtcgttttattggtttatctttacattatgcatcgtaaatgaatcgattatactctgatccacttttcctttcttagcccgcactgtgagattctcaaaacagaaatctgacaatttatattgatcagacttcttaacattaaagaatacattacaatcaatgtctatattgcgcatcgtaatgttattagaataagaaaggggagtatctttacgatctttcaaatcgtaaaactgcgtccaaggagctatattcagacaattctgtacattccctgttatatcctctaccagaatatactcatatttttgcggtgtatccgggcgcatctttagagttagaagagcacgtgctctatctaccttacaacggcggacaatcacattccgactaaggatagattcactaccacaagtaaaggcgctatgacagaatccgtaggtacagtcttcaataataatatcatagttttctccattattggcatctttatctgcccaaggtccttttccacctttcagcgccaccgcatcatcattgacagacatataacaattctttatcagcacattattacaaacatcaaggtccacagcatccgtactgggagcttttacgggactggcaggcgaagtaatacgaagattcaacaacttcaaaaaactgcatttatagaaatgagtgctccagaaaggagaattcataattctgattccctcaatctgagcattcttacagttggacaaataaataatgcgaggacgcatttcttccatattggtgcaatccggatttatagaacgccgtaaccaaaatgacttccagtaccgaagcccgtttccattcaatgttccctttccggaaattgtaaatccatccagtccgtctgcatttaccaaagccatgaagtactttaaagtctgtccctccatacgggtcattttcaccggaaaatgactaatatcatcgcttccctttaatactgcatcttcttccagatgtaaatgagtattgtttttaaagaaaagtgatccgcttaagaaagtacctttgggaataactataactccacccccattccgggcagccagatcaattactccctgtatcttctttgtctgcaccaccgtactgtcgttcgctactccataatcggttatgctatatttctttcctaaagcattcacattcacttccttgttttccctgaaccattcagggattgccttgccatcaggaaaaacctcctgagccaccatttgtgtacaacacaaaatcaatactaatcctacaatttgtttcatcacctatttatctttttacacttatctattattaatcaataccttacattgaaaacaccagtactcctgcggttgggatctcttcagttcctaccagcaccttacttccctccggtatgtcgaatgtataagaacgatctgaataattcagtacaatccccagcccgttccggtattccaccgttattccataaggcaaatccatcacaggaatctgtagctgtgcatataatttcttcaagatatccttttccaacgcaccattgtggctgtcaactccgacatatgtaacagtgcctttacccagttttcggaacgtgacagcaggaccaccttcatagaattcattggcatacgtcgcccaaacctgcgaatcagatgcgggaatcagtatttctccccatgtattccactcatattgctttccattcatgacaacagtacccggatcttccggtaacagcagatcataaaagttcatttcatttcccgtcagaggtgtgatcatagaaccgaaaggagcttccggcaaacggccataacggtctttctgtgctgtacggcaggtcaacacaagattaccaccatttttcacataggcaatccatttatttactaattccttatcagccagttggtaagcaggagctatcaccacaggatactccgtcaactccttctgttcggagacaaaatcaacgggagcaccaaatgacttcaaagtccggtaatacttctctatatgtgcaaaagtatcccatgtacggttctgtttctgccgctcgatgctccaggaattctcgtggttgaaaaggatagcggtacgacgtgccagatagtcggcaggcttcgtttcgcgcggagcataatgtttccggagttctcttatctcttttataaaggtttcatattcccttccgccgggagtgacggttacgccgtccgttcctactatcccataatgatactgctctgtgccgtacagcggctggcgatagcgatacgtacagataaaatcgcttccaccggcaaatacactccacatccacagacggacagctcccggaagcggttgcggattaatgctcccccaattcacttgtcccggttgcaactccatcacgccatacgtaccctgtataggacggaagaagtcattcgcccatgcaatacgcaacggatttcctacccgatatccacggcgtccgataccttcgttatcgccatacaccatatagcgtgtataactctggaaatcgagtgcaggactaccgccgatatgtccttcatcatagttggggatatagttggtagtaatccactggttctttgcatattttctgatcagcagacattgttcattcagaaaatcattggtctgcgcagcggcaaaacgacgataatccagaatctgatgatgattcataaacatctggacacgcttaggaagagtgatttcatcaaaagacgaataagcctcactccagaaagcggttccccacgcgtcgttcagcaactgaatgttgtgattgtattttgcacggagataatcacggaaagcctgttccgctttcggattatagtcgaactgtacggcaggttcattgtcgagttgccatccgacaatacgggaatcattgccataatgctgtgccagtttctcgatcatcttatacgataattcccgatagagcggcgaagcaaatgaggcatgctggcgggcaccgtgatcgagaaccgtaccatcttcattcttcaacaggatttcgggatacttccggctcatccacaccgggggcgtggcagtcgaagtacacataatgactttcagatcatatttggcagcaagagctactgctttatccagccaggcaaaatcgtatcgtccttcttccggctccagctgcgcccatgcaaactccgcaaagtgagtaaactcaaatcccagttcatgcatcttcttgaaatcacgttcccactgactttcatcccagtgttcgggataataataaactcctgtcaatgtcaagtccttatcgttgaaccaggaagaagtttgtgcttttacagattgatgcttccggtcatctatcagagactctacgacggaagcatctaccgcaaaggcagtcccgtggcggattcccttcggaaacgaaacctgatcggatacatcttcccacgtttcaccatgatccagcgaacggacagctccgtaacgatgatcacgatacttatcaaaatacacataaagcgcatcacccacaaaaagaggtgccggtccttccgcccaatattttccggtaatcggggcggatacctttgtcggaaaacctttggcaatattcttcgtgcgtgtcacacgcaggtttttctccggaggattggagttctcgttcttgacgaccatgatcagatctccctgtgtcggatctttcacgatagccgcgtcgatcacactgaaatcgggattgaaaaacatcttcgtctttgagaaagtacgaaaatccttcgttgtaacatagtacatacgatggttcagccctttttcgctttcgctggtaggcacttccttgtggcgtccggggatggtggtcgcccaaaaaatgtaatatgtttccgaaggttcgtcataaaagagttccggcgcccaacaattatgagcttccggctcgtgcatcatcacgggaatagcctgttgctcactccaatgaatcaaatcacgggaagaagcatatccgatgatccggtccgtccaactggaagtccagaccatgtgaaatgttccgtcgggagcttggcatatactgggatcacgcatcaatttatctttaccgacagacggagtcaaaaaagagcgtccgccgttcaaaggagtccagttcagcccatcataactgtaggcaagatgcagaccgtccttgctgtcattgataaaataagaaaagagataagcagtctcacctgcaaagattgtcattaccgaccaaagagttaaagccatccaggcaaatacttttttcatggttcactttaagattaaaaagtttacttcgcaaagatatggtatcccccagaatttcagaaatgaatgatgatggagatattatcatattcatgtagtttcgtacaccaaccgccataaaagccgtttttgatacaatattctatgtatctgtacatctttctattttatagattactcaaaagctctactttagcagcagatttttaaacgtagtggaaaacatatcaattctacatatcatgaaacaacttttagtaagtattgccattgtattcgcctctgtactgactgtaacagggcaaaaccactctttcagcctatccggaaaatggaatttccagatagaccgggaagatgcggggatgaaagaacaatggttcaataaatcgctcgacgaatccatcaatttacccggttccatgcccgaaaagctaaaaggggacaatgttaccgcacgtacccaatggacaggaagtttatatgacagttcttactatttcaatccttacatggagaaataccggatagaagggcaagtcaaattacctttcttcctgactcccgacaagcactatgtaggtgtcgcctggtatcaaaagaaagtgacaattccatccgcctggaaaggggaaagaattctcctctttctggaacgcccacatattgaaacaaccgtatgggtaaacacgaaagaaatcggtatgcaaaacagcctttgcgttcctcatgtatacgacctgacctcggccgtcactcccggcaagccgtgccggctcactatccgggttgacaaccggattaaagagatcaatgtcggtccggattcacatagcatcaccgaccagacacagggcaactggaacggaatcgtaggtaaaatcgaactgcagacgactcccaaagtctatttcgacgatatacaggtatatcctgatctgagtcacgggaaagcgctggtacgcatgaatgtaaaatcctcttcttctgccaaaggagaaataacactttctgccgaaagctttaatacggatacccgccaaaacgtcctccctgttcaacagaccttccgtattcaggcaggagataaccgggtagaaatggaactaccgatgggaaaagacttcctgacatgggatgagttcaatccggcactctacaaactgacagccacgctgaacagcggcaagcagtccgaaaagaaacaggtacagttcggtatgcgtgatttcaagatagaaggcaaatggttctacgtcaacggacgcaagacaatgctccgcggtacagtggaaaactgcgatttcccgcttacaggttatgcgccgatggacgtagcttcctgggaacgggtattccgcatctgccgcaactacggattaaaccatatgcgtttccactctttctgtccaccggaagcagccttcatcgctgccgatctcgttggtttttatctgcaacccgaaggtcccagctggcctaatcacggtccgagactgggcaacgggcagccgattgacaaatatctgatggacgaaaccatcgctctgaccaaagaatacggcaattacgcctcttactgcatgctggcctgcggcaatgaaccttcgggccgttgggtaccttgggtaagcaaattcgttgattactggaaagcgaccgacccccgccatgtatatacaggagcttccgtaggaggcagctggcaatggcagccccacaatcaatatcatgtgaaagccggtgcacggggtcttagctgggcaggctcgcaaccggaaagtatgtccgactaccgcgccaagatcgattccgtgaagcaaccgtacgtttctcatgagacgggacaatggtgtgcattcccgaatttcagcgagatacgtaaatacaccggagtgaacaaggccaagaactttgaaatcttccgtgatatcctgaatgataatcacatgggcagcatggggcacgactttatgatggcttcgggcaaacttcaggcaatctgctacaaacacgaaatcgagaaaacattgcgtacacccgactatgcaggattccaattgctggcactgaacgactattccggtcagggaactgcattagtaggtcttctggatgtcttctttgaagaaaaaggctatatcaacgcagatgagttcagacgtttctgcagcccgaccgttccgctggcacgtattcctaaattcgtatataccaacgacgaggctttccatgccgacatcgaagtttcccatttcggagcatcccctctgcaggaagccaaaacggtatacagcatcaagaatgaatatggcaaagtatacgctcacggcactgtaggcactcagaatataccagtcggaaatctttgtacgctgggaagtgtagacatgaagctaagcggaatcactaaaccgcagaaactgaatatggaaattcgtatcgaaggcagcgatgccgtcaatgactgggacttctgggtatatcccgcacaggtagaactgactcagggcgacgtatataccaccgatacactagacgcaaaagcaatctccatcctgcaagaaggaggaaacgtattgatcacggcagccggaaaaatccagtatggcaaggaagtgaaacaatacttcactcctgtcttctggaatacttcctggttcaagatgcgtccgcctcataccacaggtatcttcctcaacgaatatcatccgcttttccgtgaattcccgaccgaatatcacagcaacctgcaatggtgggaactgctgaacaaagcacaggtcatgcagtttaccggattcccgaccgaattccaaccgaccatccagagcatagacacctggtttatcaaccggaaaatcggaatgttattcgaagccaacgtactgaacggcaaattgataatgaccagcatggacatcacttcgaaaccggaaaaacgggtagttgcccggcagatgcataaagccatccttgactatatgaactccgatgctttccgcccgacagcgaatatcgctccggaactgattcaggaactattcaccaaagtggcgggagacgtgaaatcctataccaaagattcacccgacgaactaaaaccgaaaataaattaaactaattgatgactgatatgaaaacaacatttctcggacttctgctgctgacagcaacagctatcagcgctcaggaacaagcccgcacattccaactggcagacgccccccgctacagcgaggaaacaggttacggatatgaccttgcacccactcccgaaaaagggagcaaagcacctttcttcttttctgtccgtgtgccggacggtaactacaaagtaaccgtacgcctcggaagcaagaagcaggcaggtgtaactaccgtacgaggcgaatcacgccgtctctttatcgataatctgcccaccagaaaagggcagttcacagaggagacatttatcatcaacaaacggaatccacgcatatccgacaaagaatcggtacgcatcaaaccccgtgaaaagacgaaactgaactgggacgacaaactgacactggaattcaacggtgacgctcccgtatgtcagagcatcagtatcgagcctgccgacccgtctgtaattaccgtattcctgtgcggcaacagtacggtagtcgatcaggacaacgagccttgggccagctggggacaaatgattcctcacttcttcggcaccgatgtctgtatcgccaattatgccgaatccggcgaatcggcaaatacctttatcggagccaaacgcctggcgaaggctttaagccagatcaaaaaaggagattacctctttatggagttcggtcacaacgaccaaaagcagaaagggccgggcaaaggagcttactactccttcatgaccagtctgaaaacattcattgacgaagcgcgtgcacgcggagcgcatccggtgcttgtcactcctacccaacgtcgtagtttcgacgccaacggacatatccgcgacacacacgaagactatccggaagcgatgcgctggctggcagccaaagagaatgttcccctgatcgatctcaatgaaatgacacgtaccctgtacgaggcgctgggaccggacacttccaaacgtgctttcgtccactatccggcaggaacgtatccgggacagaccaggaattttgcagacaatacgcactttaatccttacggtgcctatcagatcgcccaatgcgtcatcgaagggatgaagaaagccgttcccgaactggcgaagcatctgaaaatagacccggcatacaatcccgcacatccggacgatgtgaatactttccactggaacgattcaccgttcacggaaatagagaaaccggatggaaattaaaagaatcctatactaaaagactatatgagaattaaaaacctccttcccctacttctggcaggctcgttgatgatagcgtgcactcctgccaaacaagccggcaacagcttcgaatgggggcaggtacctcagcaaccggatttatcgtgggcagacagcgtaggcagccgccaacttcccggagacaagatgattatatccgccaattcctttggcgcagtagcagacagtaccgtactcagcacagaggctattcagaaagcaatcgacagttgcgctgtctccggcggaggaacggttgtcctgcaaccggggtattaccagacaggagccttgtttgtcaaaagcggcgtaaacctgcagattggcaaaggggtgactctgcttgccagccccgacatccaccattatcccgaattccgttcgcgcatagcagggatagagatgacatggccggcagcagtgatcaacattgtcgacgagaagaacgctgccatcagcggagaaggtacactggactgccgtggaaaagtcttctgggataaatactgggaaatgaggaaagaatacgaagccagagggttacgctggatagtggattatgactgcaaacgtgtacggggaatcctcgtcgaacgcagttcggacatcacactgagcggtttcaccctgatgcgcacaggattctggggatgtcagattctctattccgactattgtaccatagacggactgactatcaacaataacatcggcggccacggcccaagcacggacggcattgacatcgactcctcctgcaacatactgatcgagaactgtgacgtagactgcaacgacgacaatatttgtatcaaatcgggacgggacgcggacggactgcgtgtgaaccgtccgacagagaatgtggtagtgcgcaactgcacagcccgcaaaggagcgggactgatcacctgcggcagcgaaacttccggcagcatccgcaatgtattaggctatgaccttaaagctgtcggcacatataccgtgctgcgactgaaaagtgccatgaaccgtgggggaaccattgagaatatctacatgacccgtgtcagcgcagaaaatgtccgtcaggtattggcggcggatttaaactggaatccgagctacagctacagcactttgcccaaagaatatgagggcaaggagattccggagcactggaaagtgatgctgactccggtagaaccacccgaaaaagggtatccgcgattccgtgacatatacctctcacaggtaaaagcggaaaatgtagatgaatttatctccgcttcgggctggaatgatacattgcgtctggaaaacttctatctttacggcatcgaagcgcagaccaataaaccggggaaaatctgctatacgagaaactttaatctatcggaaataacattggacgtcaaagacaaagatgctattgtactaaaggaaaatgaacaaagtaatatccacttcgactatgttaaaacaactactgaccgtcgtactgctggcaatttgcctcattaacgtacaggcgcagcaactgactcctcccgccggaactttccgtctgggaatatcgaaaggaaccgacagccactggctggcacctcaggaaaaagtgaaaggaatcgctttccggtggaaagccctaccggatacccgcggctttattctcgaagtagcggtcacctccttgcagcaggccgacaacttattctggagcttcggagactgtcagccggacatggatataaacgtgttcagtgtagaagggcaagccttcacctgttattatggtgaaagtatgaaactccgcaccttgcaggcggtcactcccactgacgatatccgtttgagtaacggccatcaggacaagactcccctcttgctttatgaatcggggaaacgaacagaccgtccggtcctcgctgggcgctgcccgctcgcagcaaacagtaaactttatttctgtttctacgagcaaaatacacgagcagattataattattttatgttgccggatctttttgcaaagattgatgaactcaaacatagtaaaaaatgaataaaacagtagtatctccattctcctccttcgggaaggaggagatttaagatactattgattatcatttagcttaaatccatacaaagatgaaaagaatatatctactactcagcctactgaccggttgcctgtatatgcaggcagcaatctataacgtcagggatttcggagcaaaagcagacggaaagacgattgattctcccgccatcaaccgtgccatcgaagctgccgcacaaaaaggcggaggtaccgtatatctgcctgccggagaatatgcctgttattccatccggctgaaaagcaacatccatctctatctggaacaaggcgcacgcatcatcgccgcctttccgggaaaggacgaaggatacgacttggcggaacctaatgagcataataaataccaggacttcggtcacagtcactgggagaactccctgatctggggaatcggtctggaaaacatcaccatcagcggtccgggactgatctacggcaaaggactgacccgcgaagaaagccgcctgccgggtgtaggcaacaaagcaatcagcctcaaggattgccggaatgtcacactgaaagacttctccatgctccattgcggacacttcgccctgcttgccaccggtgtggaacacctcaccctgctcaatctgaaagtagacaccaaccgtgacggattcgacattgactgttgccgcaacgtacgcatcagccaatgtacagttaactccccatgggacgatgccattgttctgaaagcctcttatgcactgggacgtttcaaagatacggagaacgttaccatcagcgactgctacgtcagcggcttcgacaagggaagcgtactggacggcagctggcaactcgacgaaccacaggcacccgatcatggataccgcaccggacgtatcaagctcggcacggaaagcagcggaggtttccgcaacatcgtcctcaccaactgtatcttcgaacattgtcggggactggcgctcgaaaccgtagacggcggccacctggaagacatcgttatcagcaatatcaccatgagggatattgtcaacgctcctatcttccttcgcctgggtgcgcgcatgcgcagtccggaagggacacccataggcaccatgaagcgtattctgatcagcgacatcaatgtatggaacgctgacagccggtattcttccattatcagcggtgtccccggtgcatctatcgaagatgttactttccgcaatattcacctatattataaaggtggatacagcgaagaagatggcaagcgcactccacccgaacaggagaaagtatatcccgaaccctggatgttcggtacgattcccgccaaaggattttatatccgtcacgcaaagaacataactttcgacggtgtccgcttccactttgcacagccggacggacgtccgctctttgtgaccgacgacgcagaaaacattgaatactatcatacaccccaagaataatgaacaagaaacaactgatactcctctgtatgctcgcagcaggtggaagcatacaagcgcaacagtggccggatgctccggcagaagcccgtcccggcaccagatggtggtggctgggaagcgctgtcgatgaaaagaacctgacttacaatctggaagaatacgcgcgtgccggcatgggcgccgtagaaatcactcccatctatggtgtacagggcaatgatgccaacgatattcagttcctttctccccgctggatggaagtcctcaaacacacacaggcggaaggaaaacgcaccggcatcgagatcgatatgaacaccggaacgggatggcccttcggaggaccggaagtcagcatcgaagacgcggcaagcaaagccatcttccagacttatgatatagaaggaggccaggaaatcgtgcaagatatcaatgtgacagacaagaagcagcaaccttattctgtcttaagccgtgtgatggcatacgacgaaaacggacgctgcatcaaccttacttcccacgtcaggaaagacaaactggtatggaaagcccctgccggaaaatggaaagtgatagcgctgtataacagcaagacacgtcagaaagtgaaacgtgccgcccccggaggggaaggatacgtaatgaaccatctttccaagactgccgtcaagaactatctctcccgatttgaccgtgctttcaaaagcagcaagacgagttatccgcatacattcttcaacgactcttacgaagtctatcaggcagactggacagaagactttctggatcagttcgcccgcagacggggatataaactggaagaacattttccggagtttctggatgaaaaccgtccggaagtcagccgccgcatcgtatccgactatcgggagacgatctccgacttattgctggagaacttcacccgccaatggacggactgggcacataagaatggcagcatcacccgtaatcaggcacacggatcgcctgccaacctgatcgatgtctacgcagccgtagacatccccgaatgtgaaggattcggtttgtcccaatttcatatcaaaggattacgtcaggattcattaaccaaaaagaatgattcggacttgtcgatgctgaaatatgcctcttctgccgcacatatcgccgggaagccttatacttctaccgaaacatttacctggctgacggagcatttccgcacttctttgtcgcaatgcaaaccggatatggacctgatgttcgtctccggcattaatcatatgttctttcacggcactccttattcgccgaaagaagccgaatggccgggatggttgttttacgcctctatcaatatgaacccgacgaacagtatctggcacgatgccccttcgttcttcgattatatcacccgttgccagagtttcctgcaaatgggtaaaccggataatgatttccttatttatctgcctgtctatgatatgtgggatgagcaaccgggacgtttgctcctattcagcattcatcacatggccaagcttgccccgaaatttatagatgccatccaccgtatcaataacagcggatatgacggagactatatctcggacaactttatccgcagcacccgtttcaaagacggacaactcatcacttccggcgaaaccggttacaaagcgctggtcgtacccgccgcccatttgatgccgaatgacgttctggctcatctgctgaaactggcacaacagggagccactatcgtattcctcgaaaactatccgacggacgtaccgggatacggtcaactggaacagaagcgcaagacttatcagcagacgctgcaaaagttaccttccgtttcattctccgaaacaacggttactccgataggcaaaggcaagattattacaggtacggattatgcgcgtactttagcaagttgtaatattcctcaagaagaaatgaaaaccaagttcggactgcaagccatccgcagggtgaacgatagcggacaccattactttatctcttctctccaagataaaggagtgaatgattgggtgacactgggaaccaaagccaaagctgccgccctcttcaatcccatgacaggcgaatgcggagaagcaaaggtacgtcagaccggagaacaaacacaagtctacctccaactgaaatccggcgaatcggtgattttgcagacttatcaacagccgctgcaagctgcccgcccctggaactatattcaggaacaaccgttcagcctcagcctggatcatggctggaaactacacttcgccgaaagcgaaccggagataaagggtacgttcaatatcgaccgcccttgctcatggacaggcatcgaccatccggcagccaagattaacatgggcagcggtgtttattcattggatatcgaattgcccgctctgcaagccgatgactgggtactcgacttgggagacgtacgcgaaagtgcccgtgtccggatcaacggtcaggaagcgggctgcgcatgggcagtaccttatcagctacgagtaggtcatctgctgaaatcaggaaaaaaccacatcgagatagaagtcactaacctccctgccaaccggatagccgaactggacaggcagggagtgcagtggcgcaaatttaaagaaatcaatattgtcgatctgaattatcgtccggccaactatggtcactgggctcccatgccttcgggattaaatagcgaggtccggctgattccggtagattatttatctttcaagacacactaaagttattatttaaatctactttcagttcaagataaggcaatatagttcgggcctgactaaaaagtcagtagtatctccaattcccctccttcccgaagctaccctttatacacaagtcttatctgataaactcatacagttcaaactgtgtataaaatctatccagtccattcttaaaggttatatatcctggaatggactggctcttgtatgcactccatgctcctaaccttgcaataatccatgctgcccatgccattgattcttttttatatggattttgctgtatttttgtatttccctcactcttttttcctactatatgtaataatgctatttctttgcttgtaaagtagatttctgaagagagtttttcatcttctttatcaaaagaaagtttgagtaccatcacctgcagggctgcctgcaaggaaattaagattagtttttgtaatgccgaaactgtttccaactgtgcgtcctcaatcatgaatccctttcttttgagcactctgaacaactcttcaatcagccatctacaacgataccaaccgatacattcaattgcttgttctacagtctccaccacatgtgtagttagcagtctccattcaatagggctctcatttaccggtgtactggaagatttttctttaacatgtatgcaataaagactaacagggggactgccctttgccggaccgttaacaggagcgcacaaagtgactctttcaaagcgaagttccatgcacgctacccgtttcttacgtccgcttcccgggagcacttcaaagctatactctgcccgtagaacagcctgctccattaatgtattcagatggacagaacagtctggatcatccaaccggcaattcctttcatgaacagaacgtatcagcaagtgaacattatcagtagggatacggctgaaaagctcgaaaatgtccgcttcacggtcaccgatgatcgttttaactgcatcccggggcatttgctcactggcagccattccactttctatccaacgatatgactctttttcttctataggctgatatctgtaattacgttcttcacgacttaaagcagccggtgagcgattccactgcttaaccgaagaaaagcctataggaatatgactggaggcatccactaccaagacaggatgcaaaaaagtaccacattgcttttgaccgacaatgccgggactggctgtttttttcttcattcgctcaacatgagcctcatagtttatctccgaggtatcttgaatacacagtaaatgcttacgaccggaagcattcttacagcaagtgtgtatcagacctgataagatagcatcagagctgactgaggaattgttcaaaaatctataagcacccatcttttctttatgttccttactaaattgattcactatagcactttgatggacaaccatctgagagcaaattaagtttaaacgccgcaaaagccgaggatcacgaatttgatctgtctctaataacatcaagcaaagataaaaaaaataatatatacttgtgtataaagggtagcttcccgaaggaggagaatagagatagaaccgactttttagtcagcctcttttcagcctgttattttaatctatacctgttattttaatctataaatgaaatagtcaggctagttcttctatggctgtaaaagcctgcttttaaagtttacgtatttctgcgtccaaggacaatgcacaagacatttcaaacaggtactgcatccatatacatcaattatatcatctcttgaaattgttatattccaggtggttcctttcaatacatttctttcgcatatatccctacaaatgttacaattaccacacttcggggaaatagaggcatacgatacagtatctaacggggcatcagtcaaaacggtaccaagacattgcgctgcaccatattcaggagtaataaacagattgtttttcccaatccatcctaatccactaagttgcgctactgttttgtgaggtaaaaccgactccttcgtttcaaaattaaacactccttctgccaaaagtcccgcatcagattgtgaaagagctttataccctttgctgacaagaaattcagctaactcgtctgttacttctcccactctattttcagttttcacatactcatcttcaagagcaggtttataatccggattattaaatacatcttttacaaacttcggacttattgcgattcctattaatatagcacatggcaaacctctattctgcctattggtcaacttggatatatctacgaaatgaacaaaatcgactcttgactttttcaattcattctctatttctttattcatatttctttctttttgacagggagataaatatctgtgattaattccgaaaccggagttttttcgggtgtattgatataagtctcaaaagtaaatggttctcgcaagctataatcatttgcaggtagccagtcaagataaatataacgatataccctattcagtccatggtatagtcctttaaaacggaatatagcatattcacccgcaggaacttcataaataccgaaccccttcggaattttaaatgattgtggtaatgttactccaaccataaaacgactttgttcttcagacgtgataaaaggataatcaagagtcaggctcacatacttacatccttttgataataattcatagctttcagaaaattgtagcacctgtttccataaaacagaaaagctatggctggcatgatgtgttctctctaattttaaatatgcaatccgtgtatgaggcactctttcaatacttggttcaatctgtattggattcttgccttcagaacaggcatttgaatgtcttttacgaaattcaggtatagagcaattaaagtagtttttgaatgcccttgaaagcgtatgtttattctgataattgatttgactaagaatctctgggacacttatattggtggatattaacttaaaagcaatgtactccaatcttaatcgttggatgtaattcccaaggctatcaccgcaaactgctttaaaaagtcggcggaaatgatacttggaaatgcatacaatttgggataacttttcagaatcaaggtcatcaaataaatgacagttgatatattcttgaactctgatcactaattcgtattgtatgtgagcggtattaattttttgcttccatcttttaatttcaggtaaccgtctggacataatttctctcaactccgacgaagtatggcgtatgccgacttctttatagtattcttcgggaaaaagtccccaaaggtagataagataatccattgagaagtcatacagtttaactccatttttcagacagtaatcacaatattcctcattttggtctgccttcagattggtataatcaatatccaaaggtattccgcaagtctggcaatattttgtttcagaattgatgttcataagttttttattattgagtgcaaagttaaccaatatgttatgcaaaaagttaccataaatagccttctttcgttttaatttgctttttattggttctgcatatctccccacgtaatttgaatgcgtttttgctctcatgctctaacaatttgtctgcatccctttattcatcgttgtttcaagtatggtagcaagtgtggtagcaggtatgagagcaaacgtttgctctcatacctgtcttgtgtctatgttgtcaattctatcctaattcttctcgtgcaaactgcaattattatcttcatcgcattcggtggttatttctgtatgtttcctcggaggcgttagtttcctcggaggaaatgccagtccctttaaaaggaacggtcgtttccattaaaaggaacgcctgttccctcaccgggaaacgacaggttccattataagaaatgataggaagcattaactcattgatgtgtactggttttagttgacaacttcgtttgttataactgaattagtttactcaatatactttaatatctaaataggtttacttttgttattcttattcctatgttagttgtcttttgttggtgcttgcaaatttatgcatcttcctttatttacgcaagccttcttcaggaaaatgtaatgttgccaacaaccaaaaactcttcggtcggggatcgccctagcggcaaggggcgggaccacccgtcccgacgagcgggtattatgctgttaatcctcccgtttcgctgaccacttccataggtgtcctcatgtttatcccttgatgaggccgcacatgattatatacatatacagcatcttcaatgcgcttgcttacttgctcgaagctctcatcatcacagtcgaatagccaaccgtttttaatggtgttgttcattctttcagccaatgcattatgtaaaggatcaccacactgcgtcatactgatgttgatttgatgctctttaagcctctctacatatttatttgagcaatattggacaccccggtcggaatgatgaataagagtgctcatgtctatgtgatacttctcatagaatgatattgccatctccaaagctttcaagggcccctccgtctcaagagttttgtaaagcgcatatcccacgatggcacgacttgacgcatcggtaagcaacgagaggtaagcccagccctgaccggtgtttacgtaggttatatccgccactaccatagcgcccaatcttgtagcgacaaatttgggtgcaacattcaacagatcggggtagatatagtaattatggttcgaattcgttgttttaggacgcttgcgacttgtacgttgacacaaaccattggagcgaaaaatgtcatagcaacgatcacgaccgataaccatctttggtccaaacttactcacgcagcaggcgtataactcgcgcataccagctttgggcatgagttccaacagttctttgcagtacaacacgatgcttgtggtaaggatatcaacctccaaatgtcggttcacatgcttgtaataaccttgtcgggttatgccgaagtaatcacagaggaactttatacaaccacgtttgcgtcggggtgagtgcctctgtgacaaggtgtcgattacttggcatcggagttttttcgtaccttgatatgatacgtggattcagcaagattgatgagttcttcgcacgcctcgtgacgtaaactctcatcagcaagagcccgatgaagtttacggttctcagcacgcaatagcgatagttctttctggagctcagaaatactagaatcaatagcatcgctatttactggtttagaggatctacccatatctttgtcttctatttgatacttgttaagccaataagtaagaagcttggcacaaaagccgttacgcttacaaaactcagatttgctctcgggacttgataaatactcacgaatataagacattcgttcatcatcactgtaatagttgtactgctttttcgaatatttcatctttattttcgatttttgaagtgtcaacttattcagtacactacacatttattgatcaataatacatgagttatcagtctttaatacctgatttctcaactattaatagcttaaaaatcaaacgttaatagttgacacatcagatattaacatcctgtataccaaaagataacattacaaaaacgatattaatcaagacgagatagagtgagagcaaccgtttgctctcatacttgccaccacgcttgctaccacccctaaaacatcgatgaataaagggatacagatgaatagttagagcatgagagcaaaactgttatctaattccttatggtgcgaacagaaaaaagggactctttttataagaaaaaaagagaaatcactgttatgtgagacactgtccacaaactattcgaaattctttcgataagtacatccatttctccattccgaacatccgtaagctgtcttccctttaatgatggttcccttaccacaaaccggacacggttgtccgacaaaagtatctgcattacctgtagccggagcagaggcaggagcagaaggaatcgaagcaggagacggagaagatgcaggaactttcgattctgctttcgccttcttttctttgggagcacttgctttacgctcacgcttcttaggttctttctttgccttttcttccgtttgggcaactgcctcctgaatagtgatacgtcggttcgtattatctgaaagtacgctcatcacgatttcagataccatttgcttcagttcttcgaggaattgacgggcatcgtaagtcttcttttcaatctcacgtagtttcttttcccatataccggtcagttccgcagatttcagcagttcttcgtggatgatctgtaccagttccactcccgtaggggtggctatcaggttctttctttccttgcggatatagtttcgcttgaacaacgtctcgataatggcggcacgggtagacggccgaccgataccattctccttcagagcatcacgaagttcgtcattatccaccaactttccggctgtttccatcgcacgaagcaatgttgcttccgtataaggtctgggcggttgcgtccacttctcattcaagtccggaacatgaggaccactttcccccttgacaaaagcaggaagtacattttcatcctcttcctctttttcttcggaagtatctttcacatctttggcaaaaacgacacgccatcccgactccagaatctgtttgccggttactttaaattctatcttgtccacttcgcccatcacggtagtggtagaaatcttacaatcgggatagaacaccgctataaaacgacgggctatcaggtcatagacacgacgttccatatccgtcagattctgtgcataaacgcctgtagggataatggcatggtgatctgttaccttcgaattatcaaatacctttttcgatttaggcaatgaagcacctgccaaaggagcagtcagcacctcatagtctcgaaggcctttcaatattccgggacacttcggataaatatcgtcactcaggaaagtggtatcgacacgcggataagtagccactttcttttcataaagcgactgaatcagcttcagcgtttcatcagcggaataggcaaacttcttattacactctacctgaagggaagtcaggtcgaacagacgcggagcatattcctttccatccttcttgccgacattggtgacaatgaacggaaggtcttttatgcgttccaccagcgcttctccctcctcccggttggcgatagggtcgatgccgggattgtctatcttcttctttccgccactcttttcttcttccgcagcaatttcttcatcgcttttacggatcagagcagaaaaggtggtatcacgataatttgttttcagttcccagtattgtttcggctggaagttggcgatctccagttggcggttgacaatcaatgccagcgtaggagtctgcacacggccgatggaaagcacttgtttgttctgaccgtatttgatagtataaagacgggtagcattcattcccagcaaccagtcccccattgcacgggaaagtcccgcttcatacagtgattgaaagtcggactgatcctttagtttggcaaatccttcgcggatcgcctcttctgtcagcgaagaaatccaaagacgtttcaccggacagcgggcacctgccttctgcatcacccaacgctggatcaattctccttcctggccggcatcaccgcagttgatgatttcatccgcattctgcatcagtccctcgataatgtgaaactgcttttcgtaagtagggttctctatcagcttgatgccgaaccgtggtggaatcatcggtaagctacccaagttccatgatttccagttaggggtgtattcatgcggctctttcaaggtacaaagatgaccgaatgtccaggttacctggtatccgtttccttctatatacccttcttttcttgtatgagcgccgagtacttcggctatatcacgtgctacagacggcttttcggctatgcaaactatcattttttctcttcttgtttttatactaacagtctacaaagttacatgattatttctcactgaccgcataaagacgaaaaaaacagtagcatggctcatttacgatagcccccgtacaatgactttcgggtcatcatacgagggcttccggatattaccagtctttcttaaacgcataataatctgctgccgcctttctagtttccatattggaactccacatataggaaccgtcacctatcatttccgggtcgggattcatatcatacagcatcatggtggcatacatcattgtacccactaccacgccttcttttccataatccatatatggcatatcaccaaaaacatagaatttattgttgatcaccgtttctccgtcgcacaacatcatcaacttttcatcgacttccatcatctcatcttcaggcaattccatcatttccggtataaagaccgaggcatacttttccatcggtatgccaagtatcggtttcaattctgcatctgcggcataaggattcaaaaagtcggtgagcgagctccaagcataatccagatagtctccgccacgtatccctgcctgttcctcacaaagagactgagtcgtttcacgggtatcgaccatcgtcaacaatttgtcgggcatgcccgttttcaatgcttttatcaacttagcatacgaggtatcgttgacaggggatgctccttccttttcgtagccggctccttcatcccacaagttcaccccgtccagtttgaaagtggcgacagcggccttcacctgtgcgacaaagtcattgatctgaccatccgacagattggcaaatcccagaccggtacctccacctttgattaccagacagactttcattccggtctgcctcaacggctgaagatagcgtgcattgtttttcaggacatgctccatatccagcgtatacgtcagcatggcacgtccttgcgtctgtgtcagaaaagctgtgcggacgtttactatatctatggtaggacatcgcagtaccaattcttctgtccacgggttaaaatagaacttgctcactgtagatatatactggtcggctatcagtggattcatgacttccgtatctacataagcaacagccaaaaactgctttccttcacgtgacggaggcacgatcgcagaaatgatatattctacctttccatacatttcacctgtcgctacatccgtagcaaaaaatgggaacaagacatcctctcgcccgagattttcatttttaaaaaggagtttaactttcgcagactgacgttcaccggcagcaatagtcacagtcgtctcacgccctccgtttatcaggaagttatcggccaaaggaatggatattccctctatcggatcgacagcgttggcggataccgtcatattatgctctttcttgaagtctattacatactgcatggcatacggcgatacatatccgccttcgtccggttccagataacgttcatccattgcgattttcagtgtcagatccttttctgccggcttgctcaaaacaaaacagacttcatcttcgactcctgcatcggtcatacctcgattttcttgttccgaactccctgctataagttgtatgatcgcatttcccggcgaagtggtactattaaaataccccaaacttgttacagtttcttccggcacggtcgacttgtcgtgtccgacatcgggattaagcagtgcagcgtcttcctcacaagcggtcatcaccgacagaagtaacattccgactcctatatatgataatattcgtttcataattatgttgagttaattaggttattgttcttgattcactttaggcacttcgattccgctaggccatagttccgcatcggtcttgggatatgtctccacgtgcgttgcatctttccagtaaggaatcactttcgcatcatttccgttgcctgtacggtcggcaatggtcattcccgtgccttcgtcaaacttccagtatgcacacaggttcgcttcggactgcggttcgggaatatcatacatattcttgtagatttcctcctgtgtccgtgctaccttccagatacgggcttcgcagatttctccgtccaaatgacggctcggatcactcgactctccgtaagaacgtccgaagtagaaattgaaatcacctccgttaccaaattcattatccgctgctttatctcccagattaagagtggtcaggtcggactttccatgattgttatctatgtgctgtaactgtccgtttacatagaaacagatggtctttgctgccaaatcccatgtcagggctatgtgataccattctccggccgtcagttgtttgcgcttgtcctcaccggggaatttgcctaccggcgtctgcacttgcagctgctggcgcgggaaactggaatcaccaaaacgcatacataaatattgttcgattcccataatagaggaaatctctttctcaaactgattgacccgaacgattacttccatcgtaatagcagtcatattatttaccacatcggctgtcggactccccttgtcgaatccgggaacagccacatatacatttttcagattgatggcagtagtaatggcactcgaccgccggaccagatagtacatagtacgagagccgttcatcagtcctacttcattcactccttcgatagtcaacggacaaatataggtcgcgtcaatttccagttcatccagtccggtgaattgaatagccgcttccgatgaagtcgtttttcctgccggaatggtgacggcttctgctgtcagcttataatgcctggcgggcaatacttcatactgagtatcattctttgcattgtacgcatctgccagagaagggtttatctgtaagcggacggttacgtccaccccaaccggataagtcagcttggcggtaaacttcttggtctgctccgtcactctccggttgaaagtgaacgattctacattacgaatctcagccacactaagatatgcagaattatcaaacggggaatgatcactataatccgtattatcgcaggcggtaaagagcattgtccatacacagcctgtcagtaaaaagaattttctcattgtttcctccttactttatttaccctttgcggggttcagctgctgaataagcccgcgggtttgtttataaataatgtcactgttataatagtcagtacctacatcgtagatacccactcccgccagtggtcctgcattttgggcaaaatatgccgcccgattcagagaagaatgaactgtcttgtcattgtcggtcactgtacgcccgtgtacacttcccaacatcagacgttcggcgcttactccccagttcaaagcatgattgatggccatttccagatcataatcatcggcggctgcggaaacatcgacgatatagtaatcgaatacgctgcgctgtgcttcggacaccagcaacggagttccttcgaatatcagcaggcagtctgtctgccccaaagcatccgccaatgttttcaccacagactcatctacggaagatgcggaagctaatgccacaccgtcaaacgttccggcacgtacggcatcaatggcagcagagagagcagcgttcagcccttcggcagccgaagcgtcaacataatacagtacccgtgttccgtagtcagtacgtaccagtttcatatcttcacggtcgaacccggaaagacggccggcattgcgcatggataccagatcgatactgtccggcaacgcacgcaggaagtctttctcactggacgatacttccggcgcattgtccagccgtgcatagaccagtgcgtgcttggcggccttatacgcccgcagcttctgggtataagcggcatattgctccggattctgttccttgaacccgtttatctcactatcatgaatttccatctccgtccagtcatcgcaactgacaggaaccatcaacagaaagacagacagtaaacacagatttaatattggtttatatttcataatctcattgatttaagaggttctataaagttcattattaattccccgaatgatttttcacgtcccaccaaagccgtgttccggcagcatcgggtccgttcagcatttgtacggcttgtccgatgtaggtcggattcgagttatactcatcggccgggaaaggcagacggcgggggcctatagttacgttaacactgttgttggggtctttattttccaccacaggcagcagtttgggataacccgtacgacggtgctcagcccatgcttccactccgagcggaaagatggcaatccacttctgagtgataatacgttccagattcttttcaaagttagcggcacccggttcccaggctatagtaatagtgcttacggcatcatggctgtattctcccatcggatctacatagtcagcgggaactttctcatcatctttcacatacgcatcggctcccgacgctttgcgctcgtcaaatgataaggagactgctttctcgtacaacgcctgcgcttctccgcccattgcccagccacgtaatgcgccttcggcacggaggaaagtcacttcggcagcattcatccacagataagggtcggtgctgctgatgatctgtttggagtaaaggttaatcatatcatctttctttttggtgaagatgccgatgcgtactccatagaaatcgtacacgtccaccttctcgccctcctgatcgaccgtttgcacgcccttgacaagcatcttgtccagtcggggatcgtcgtagcctttcataatggatacgaggtcggcactgatacggtagtcactccagttattgaacagcaattcggagcgattctctgccacgtgcagcgctgcattatcatcgttcgattctatgacgccggcggctacggcagcttctgccacacgctgcgcttccgcaggtttcacgtagctcatccgcatggcgatgcgcagctgcatggagtgcacgaatctgcgccatttcgttatatttccgtagtaaaggtcttccagcttgcggaaagcttcggacgaaaggtctttattttcttccagcactttgtccgcttcttcgagttctttcagcatctgcgtgtacacctgttcctgcgaatcgtaggctaccgcaaggtcttcacctgagttatcatcactcatcatgttggagtaaggaatcggaccgtacatatccgtcacccggtgcatgatacatacgcgaagtacttttccgaaagccagcgccacggggttgtccgtcttgttcagcatatcgcggtattgcggatacatctccgtgatagggtcggcaaaaggagatttgagccatccctgttcggggttgaaggtcgaaaacttcatcacccaagtatctacgatgccttccagataacctccgtaggctcctcctgccatcgcatccataaattggtacaggtgttcacgggtcgggatcaccagtccctgcattcctctcagtgtagcgccgacgatatggttctctcgctgcatctcttccgcatccgcctcgtatatgctacgattgatttcactgtcgaaacagccgcccaaaggcagcataaataccgaaaggatcattatttgaaagtaatatattcgtttcatgccaatcatagtatttagaagtttatcttaatgttgaatcctatattccgggtactcggcatcatgaagtagtcgattccctgataatagttgttcgtagtagctactgcttcggggtcgaaaggagctttgcagtagatcatccagagatttttgccgacaagggaaacattgacgtcacacacattgcccagccaacggcgggggatggtatagccgatacgtgcttcctgcaagcgaagattggttgcactgtaagtatagtaagtaggcaaaccgctttgcgacgctactaccgaataaaaaccttgcggattcacccggctgcgtccgttgatccatactccgcccgcatcacgtgcggcggcagaagtctcggatacgccgtaaaggtcgagataagcctgtgtagccgaataggcgatgccgcccagacgggctgtcagcaggaatcctacattgacgcctttgtaagagaaactgttgttccatgccaggttcgctttgggaagtacactgcccagtttgatgtcaccggcattgtctatcgcagtcacattgccgtcattgtccaccagtacattgccattgatatcccgtttcaagtcggcatgagtataaaggtcgcccaatgtaccgccttctttcaggataaacttcgcttttccgaatccgcgtccttcatcggttttcagttccagtttgtcgacgttatatgtttttccgctttccgggtggatatagtctttcaccagttccacgatttcattcttattggtcgagaaggtgaaactgctgtcccatccgaagtctccccaacgatgcccgtaagacaacatagcctcaaaaccgtagttacgcacgtatccggtctgaacatacagtttgtcgtatcccgaagatacggggagttgcggatcgaacgtctgattgtaggtattggcataatagaacgatccgcttactttcaaatctttccataaagttgcatccagccctatttcccacgaatcggtacgttcgggatagagcttcccgatgggataatgcgtctgtgatttccagtcctgcttgttggcgtcataagcataggtaggataagtgaggaaacgcggatagggcgtaccaacggaactgaacgaaccgcgtactttgagataatcgatccattccgggagtttcaccatttcggaaataaccgccgagagtcccacagacggataaaagaaagacgcctgcggagaattggtcaactgggatgcccagtcattacgtccggtcagagtgaggtagagcatactcttccagcccacttccgcactggcaaaaacagattccgtagcttcacgccagccgacttgcgtggcacgtttcttggcattgtccaagtcatagacgttgaagagattcggaatacctgtatcccgtatcggaccggcatagcccagttccttgctggtgacgccgctatagctggcaccgatattggcaacgatggtaaagtcctgaatacgtttattgatattcacaagaacgtccgcataagtctgcgagtattgcccgttgtttacggtgtaatgtccctgcgtgctgccatccgtcaatgtggtgctggtgcttgcatagagtttgccttcatattcgctgtgagtattgtctatacgcactcgtccggctacattcagccagtcaagaatctgataactcaggcctgccgatgccatataacgcttcttattgttaagccggagattgcggtaagcaatccagtaaggattctgcatacgaagatcgccttcgccctgcggccagaactggacactgatctttcgcgcctcatcccagcgttcgaagttctttatcagcgaaaagtcgtctccccgcgggaagagataagcggaaaccagcggattggaatactgtccctgattggtcatattccggtcgttctgaagaatataactggcactcacatccagtttcatcttatcattcaggaaactggtcgtattgcggaaagtaaaattataacggttataccggttgttcggaaccatccccgccgaattaacggctgccgccgagaagaaggtctgattcttgtccgtaccggtggataaagtgacagagttggtatataccgcacccgtatcgaagaagtccgttggttcgtaaccgttctgagctgccggattcagcttcggtccccagctgtaaatgctggaattgccggctttgccattacttcccgtcccgtaacgcccttgaaaatcgggcatcttaaaaggattcagccactcaaagccgctcgatactcctacctgcaacttaccgatttcgccctttttcgtagtaatcacaatggcgccattcgccgcattgctaccgtaaagggcagccgcagccgctcccgtcaacacggaaatgctctcaatatcttccggattgatatccgcaattccttcactggcaccctttgaaccaaattccgtatcgcctccgcctccgaaattgtacatcggaataccgtcgatgacgtacaaggcattactgctctgctcaatggacttcgtaccgcgcatcacgactctgctggctccaccgactccggaagaactcgtattaatcgtaacgcccgccactttaccgttcagactattaatgaagtttgcatcctttatctgagtcagttcatcggacttcacctgctgcacattgtaactcaacgctttctgctcgcgtttgataccaagtgccgttaccacgacttcacttagcaacctggcgtccgaagccagctgaacattatacgtattctgcacccccacctttactgtttgcggagcatagcctacataagtgatgctgagcgtactgccaacgggggcttcaattgtaaagttaccgtccagattggtgatcgctccgatggtcgtaccttctacaagtacgtttacaccgatcagaggttcgccctgctcgtccagtacctgtccggtgatccgcttggcagataccggttcggttactttcttttcttccggaacgatgatgacatattttcctttcaactggtaggtatagcccgtacctttaaggatttctttcagagaggtttccaaggtcgctttttccaaagcgagatcaatggaaggcttgttgatcaactgtgattcgttgtagccgacggacaatttcgtctgcttctccacttctttcagtgcctcgatgacggatatatttttcttatgaatcgtaatccgtgcatggttgccttgagaaaaagcgggtgtcgataaaagcaggcagcacaaaaaaagcataaatactcgactcattgcctgcttattgactataaattcataaatttgctgcatcttcttagtattagtttatacagatatagttagattctcggatttagtagcgtctgggtaacgctaatagtaagaattttgatttcacatccggaggaagctgcaaccttcttccggatattttttcaacataggctttctgtttttcaaggttaatgaatcaggtttattcagttagatgactcagatagcatttgtcccccacaatcttatactccagatttcccgtcacacgggcaataatatccagtacctcttctatcgatgcattcggtccgaagctgagattgaaccggtcttccctcaaactgcggaaactatacacaaaggtatacggatatttgcgttccagtcgggtgaaaatctcctccatcgtcatactgcggaatacaatttcaccccgatgccaagccgtaacatcctgcatatcgggacggagcacactgcccgaacgggtatgcttgttatatgccagctgttcgttcggttccaatatcttctgttctttctgatcgttatactctaccaatacctttccggaaattaatgtagccgtcacttcttcctcttccggataagcggtcacattaaattctgttcccaaggcagtaatctggaagtcagatgacttcacgataaaaggatgtcgctcgtcccgcttcactttaaagtctgcctcgcctaccaaatatacacagcgtgtatcaccggtaaatcgctggggataaagcaaagtgcttcgggagttgatcatcacctgcgtgccatccggcaaagtaatattccttgtctcggcagtagggatataagcctgcaatacgtccggtgcctgccggttctgcacagccagatagacggcaaccgaagatacggtgatcagcaatgctgccgccactctccaagcaaccagtcgggtatgaagagtacgaatccgctgtcttgtaccgattccggtcaattcgtgcatccgctccaaagaatgctgataatcgggcgtcgttaccgattcggtattttcccacagttcattcagggtctgttctttttcattggtatgctcttcgtcagtcaaccatgcacgaaagtcctgatcgacttctttcgggtagtcgtgttttatgtaacggctgataatatcgtgaatataattcttcataaaagtatttattggtttatagaaacgcttacataaataccactactcagaaaggcaaactacgggaacagaacgggcagtataacaaacattaacactttgtgcagttctgtcaatgtcttatagatatggtcttctaccgtgcgtacagggatttgcagtttttcggctatttctttatgagaaagtccttctatacggctcatctcaaaaacctgtttccggcggggaggcaactgattaagtgccagttcgacaagcagcacgatctctttatagtaaagattttcgagaagggaggtgtcttcatcgcacagttcaccgattaattgcgaacggatgatatgactttcatactcctgttccaccttttgatgcttgaacaggttgaagatttcatttcgggtaactgtataaagataacctgtcatagactcctgcccctgccacagatcgggacgggtccacaactttagaaaaatattctgagcgatatcttccgcatcttcctctgacttagtcaacaagcgtgcaaagttcttgacacgcgggaagttggcagcataaaattgctcaaaacgggcatccatgtcatttgtcttttcattcattcgcttagtttttgcaatgaaggggtagacaaatataagcaaatctcagctatgacaaagaatgctggaaaaaaggtatcccgtcctgtcggtctggtataaccgaagggcgggataaactattatttacaagaaaaaacgttgtgtttattcttcatccatcaggatttccagaatctggcaagcagccttcgctaccggagtaccgggaccgaaaatagcagctacacctgccttatacaggaagtcataatcctgtgcagggataacaccgccggcaattaccacgatatcttcacgacccagctttttcagttcttccataatctgcggaatcaacgtcttgtgtccggcagccaatgaagaaacacctactacgtgaacgtcattttctacagcttcacgggcagcttccgccggagtctggaacaatggtcccatgtctacgtcgaagccacagtctgcataaccggttgctaccactttggcaccacggtcgtgaccgtcctgtcccatcttcgcaaccataatacgaggttgacgtccctctttcttagcaaacttctcagccagttcacatgcacgcttgaagtcgccatcgtttttactttctgatgaatacacgcctgatattgttctaattattgctttataacgtcctacaaccttttcgcaagcataggagatttcacccagcgttgcacgaacacgagcagcttctacagccagttccagcaagttacccttaccggtctccacgcattcggtgatggctgccagtgctttgtccacttctgcctggttacgtccttctttcaaacgtttcaggttctcgatctgttcaagacgaactgccgtgttatcaatctcaaggatatcaatcggagcttctttttccagacgatatttgttcacaccaacaatagtctgagaaccgctgtcgatacgggcctgcgtacgagcagcagcctcttcgatacgcatcttaggaatacctgtctcgatagctttcgccataccacccagtttttctacttcctcgatacgttcccaagccttgtgagccagttcgttggtcagagcttctacgtagtaagaaccgccccatgggtcaacgttcttacagatataggtttcttcctgaatataaatctgagtattacgggcaatacgtgcggagaagtctgtcggaagggcaatagcctcatccagcgcattggtatgcaaagactgtgtatgtcccaaagcggcagccatggcttcgatacaagtacgtcctacgttattgaacgggtcttgttctgtcagcgaccagccggaagtctgagagtgtgtacgcaatgccagtgacttcggattcttcggattgaattgttttacaatcttagcccacaacatacgggcagcacgcatcttcgcgatttccatgaagtgattggtaccaatcgcccagaagaaagacagacggggagcgaacgcatcgatatcgatacctgccgctgttccggcacgcagatattccagaccgtcggccaatgtataagccagctcgatatctgccgtcgcacctgcttcctgcatgtggtaaccggagatagagatggagttgaacttaggcatcttctgcgaagtatattcgaaaatatcggaaataatcttcatagagaatgcaggcggatagatataggtattacgcaccatgaactctttcagaatatcattctggatagtaccggccatttcttcgagtttagcaccctgttccagacctgcattaatatagaatgccataatcggaagtaccgcaccgttcatcgtcatagacacggacatcttgctcaaaggaataccgtcgaacaatactttcatgttttcgagtgagcagatagatacaccagccttacctacgtcacctaccacacgttcgtgatcggggtcataaccgcggtgagtagccaagtcaaatgctacggacaaacctttctgaccggaagccaggttacggcgatagaaagcatttgattcttcggcagtagagaatccggcgtactgacggatagtccaggggcgaagagtgtacatcactgaatacggaccacgcagataaggaggaagtccggcagcatagccgaggtgttccattccttcgaggtcctcttttgtataaacaggcttcacgtcaatgtgttccggtgtattccaatcagcggaaataccgttagccttttgccattcagcaccgttagcgggctgaaatgcagcatatatatctaagcttttaaaatcttttctcatcttacttcaatagtttggcgttaaactctttcaaggtatccaatacgttgacacgcacgtggatgaagttctcgatacctgctgccttcagttcatccatacaggcgggagcacctgctacgataaacatagcgcggccgtccaatgctttgaaagccggcaccgcatattccgcatattcgtcatcgcttgaacagaggactacaatgtcagctttagcagccatagcagcttctactccggcttccaccgtttcgaatccgaggttgtcaacaacttcatatccggcacaagcgaggaagttgcaagagtattgcgcacgtgcctgacgcatagccagattaccgatagtcagcatgaatgctttcggacgtttgccggaagcttccgtttcaagacgcaacgcctcaaattcgctggcagcacggtcaaataccaaagtatccacatctttctcgcaagtatgagcatcacctccgcagcagcatttagcttctatcggctgtttctcgcctgctttttcattgaagttcgggaactggttggtacccagtagcacttcgcgacgttgagcaactgccttatgacgagccttgttgctttcgttcactgctgcctgaactgtaccggctttcagtgcagcatagaaaccgcctgcctcttctacggcaaggaagagttcccacgcttgtttagcgatagacacagtcaggttctcgatataataagaaccggcagccgggtctatcactttatcaaaatgagattcttctttcagtagcaactgctggttacgtgcaaggcgttcagagaattcatccggagtcgaataggtcttatcgaacggaacgactgtcattgaatccacacctgccaatgcagcactcatcgcttcagtctgtgtacgaagcaagttcacatgagcgtcaaacaaagtaagattgaaagtggaagtttcggcatgaaccgccatcttcgcagcacaacgacattctccattagcccccttattatcgcaatcacgcaagcattcaggatggtaagaagctacaatgtttgcccacagcatacgtgctgcacggaattttgcaatttcaaggaagtagttggaactgataccgaagttgaacttaattttcttggctactgtagcagcagggatacctgcgtctgtcagctggttcatgtattcattaccccatgccaatgcataacccagttcctgagaaatgtaagctccggcattattcagcgagattgcatttacattcagtacacgatagaaaggaagcggttggatagcttcgattagggctttggcagtttgaaccatatcgcctttttctttaccgcgagtcagcatcttgttaaagaagtcataattgacagaacctctcagtttcttcacatcataatccttcttctggaaataagctaccagcagaccggccaattcaaccacatgtccctgacaagtagagaagttcagttctacacattcagcctgaatatcattcaacagtgtttcaatgtattccgcattgagttcctttgcttttacgtggaaagaaagtgagtcaacacctttgttcagaatatccagtgctttggcattggcttccttcgggcattctactttgatttcctgacgaaccaaccactcattattgttcttcttggttcctctcagataaggaaattctccgggaagtgcatctgttgttttcaaaccctccagatcttccatccggtagaaaggtttcactttgaacccttcgtttgtcttccaaacgagcttcttctcaaaatcagcacctttcaagtcggctgtaaccttctccatccattgttcggtggagacaggagaaaagtctgagaagagtttttcttttttgtctgccatagtttatttaaaattaaaacaagaattaatattgtctttatttttatttgtctctttctaaatgtcagtcgttcgacttgcaaatataattaataagttcgaacgattcttctttttagaaaaaattcgcactacaggttacagagagaaaatgaagaatgataaactaagaatgaagaatctccgtgcaacttaaggctaaacgaagcaaattcttcattcttcatttttagttctccttttatttgattagctccgatgtaatgagtaattttgcacccgtttttagaagaacattataaaaactactaatatttatggattggttacaaagtttattgtgggaccctagctctgtggcacacattgtattcctctacgcttttgtagtggccgccggtgtgtatctcggaaaaataaagatattcggagtatctttgggagtcacttttgttttgtttgccggcatcctaatgggacatttcggcttcacagccgatacacacatcctacatttcatccgtgaattcggattgatcttgttcgtattctgtatcggtcttcaggtggggccatcgttcttctcttctttcaaaaaggggggaatgacattgaacctgttggctgtaggcatcgtagtgttaaatattgctgttgcattggggctttattacctctggaacggccgtgtggaattgccgatgatggtgggtatcctctatggagctgtgacgaacactccgggacttggtgccgccaatgaggccctgaaccagttgagctacaacggaccgcagattgcactgggttatgcctgtgcgtatccgctgggtgtggtaggtattatcggttctatcatcgctatccgttacatcttccgcgtcaatatgcccaaagaggaagagagcctgaaaactcagagcggagacgcgcaccacaagccgcatatgatgagccttgaggtacgcaatgagtctatcagcggaaaaacactgattgaaatcaaagaatttctgggacgtaagtttgtttgctcccgtatccgtcacgaaggacacgtaagtattccgaatcatgagacgatattcaatatgggcgaccagttgtttattgtttgttcggaagaagatgctcccgccatcaccgtatttatcggaaaagaagtggaactggactgggagaagcaggatcttccgatggtttcccgccgtattttggttactaaaccggaaattaacggaaaaacgctcggttccatgcacttccgtagtatgtatggtgtcaacgtgacccgtgtcaaccgttccggtatggacctgttcgctgatccgaacctgatattacaggtaggtgaccgcgtaatggtagtaggtcagcaagatgcggtagagcgtgtagctggtgttttgggtaaccaactgaaacgtctggacacaccgaatatcgttactatcttcgtaggtatcttcttaggtattcttttaggaagtctcccgattgcattccccggtatgccgactcctctgaaattaggtttggccggcggtccgctggtggtagctatcctgatcggacgtttcggacacaaacttcatttggtgacttacaccacgatgagtgccaacctgatgctgcgcgaaatcggtattgtgctattccttgccagtgtaggtatagatgcgggtgccaactttgtgcaaacagttgtagaaggcgacggcttactgtatgtaggctgtggtttcctgatcactgtcatcccgttgcttatcatcggtgcaattgcaagactatattataaggtaaactacttcactctgatgggattgatagccggtagtaatacggaccctcccgcattggcttatgccaatcaggtgacatccagtgatgcaccggcagtaggatattctactgtttatccattatctatgttccttcgtatcttgacgggacagatgatattactggcgatgatgtaaagcgaactaatttaattaataaataaagccgaccaaattcagaaagaatttagccggctttattattatcgggattttgttttcttcttcaattacattccaatctgtagttttttagccacaaactcttccacaaaccgcaccgtctcttcaattcccaaagaagaggaatcaacacacaaatgataagtagccgctgctccccatgtcttataactgtagtaattataatactccgaacgtctcttatccgctttttctatcatctcttctgccgcctcctcatcaatacgatgcatctgacataaccgtgcgatacgatcttctttagtagccgagataaagacatttgcacaacggggatgttcccgtaaaatatagtcggcacaacgtccgacgaacacacaggatttctctgccgccagacgacggataacatcactctgcaccttaaataaagcatcattgctcagacagttggtacatggcattgccccttcactgatgaaaggaaaacgcataccgaacagtccgccgataatgccttgcgaggctttttcatcagctttttcgaagaactccttacataagccgctctcttcggaagccagattgatcagttccttatcataaaagtcgattcccaaacgggcagccaacttctctcctatttcttttccgccgctacctaactggcgaccgatattgataacataattaccgctcatagtacattttgttttatggtttgatagcaaacatacgacttttttctaaaagatgcaccattatacaaaagttatatttaaaagaagcaatcggaaagcatccttttttcatatatactctgccaataatacatctacatggcacaggagtccggctatcacccacctattttttcttcttgccccacttgggagttataccgataaagaactcgaagctaattcccggcatcggacgggataataccgaaagatactcttcgtcaaagagattattgactgtcccttttaaggataaatctgcccaacggagtgagaatcctttttcaagggtcacgttgctcatgagatagggtgggaggtgtcccgtataggatacagcattactcgtcattgtataacgttcgctatagtaacaccatttataaagaagcccccaactgcgatatgtcagcctgcctgataacgtagctgaatattcgggtatgtatggtaactgcttccctactgactggtcagccttgctcgtaggttcaccttcattaatagaaggagtccacgcaaatgttccatttaatccaagcttccatgctttatcaattgcaactgcataatcagcctgtacttccacgccataggcgtgtacttttttaagattaacgggggaataaaatcccttcgacgtaggtagccaaataatccagtcgtttatatgttgatcgaaccaggaagccgaaccggataatgtataaacattatccttatccacagaaaaggacagccccgtttcgtaagtaaatccactttcattattcaatgccggattgccacccggcaaaaaataaaggtcattcaatgtcggaaaacgataattacgggtaatagaagcctttgccattatattgcctcttttagaaagaacataatctacaaaaaaggcaggaataaccggtgcccatttagtcccgaacatctctccccgcaggaccaatgacatacccaaccgattgaccggctgccatttcaatgagacattacccgacaactcaatacgtcctttatcaaaataaacaatagaatcattcttccttccctgaccatacttatcgttcttattatcatctttattcagatctttatccaaactattcaccaaatgctgatgagccgacacacccgccgtcaaaaggagtttatctgagaaaaaatactctccatccaactgcccgtagaaagtattgactttactacgtgaacgggtcattgtagccattataccatttcccaaatcccgcttatagtcgtacgccaaccatgtatgcacataacctccccttgccgatactttccagttttcacgcgtatgatcccatgataaaacacttcgcagtgtatgttcccgttgtcggttctcgaaatccataagatcaccctgatcggtcgtcagtaatgccagttcacggttagaatcagtataccacgcattcagtccgaagcgatcacctttacccgtattgtaatatacctcctgtaaaatgtgcagatctttgtatgcaccactacgattacgttctatgggataatactgttcgattatattatatttatcatcataaatattctctttcttatcatgattacgatatttataatcattgggcgacgactgatagaccgcccgcgtcgagatctgccaatgtttatctccatacttcaattgcagaaactcatcgaaggtactaaatgaaccgataccttgaacatattgcattccgaagccttcttgatgagcaggcactgtagataatttcaccaatcctcccaaaccaccaccagccatattcaccgatgaagtgccatgcagcaaagaagcgtcatctataaaataagatggaatcatcgaaaagtcagtcatccccaacattggattgttgatacgcataccgttccatgttacctgtgtatgcgaagcagacgttccccgaaatgatacagtagaaagcgtggcacgtccgtagctttttacaaaaatagaagaattgaaagtgagtatatccgccattgacaaggctatattctccttaagcacaagtgaatcaaatctggtctgctgtacgcctatatctttcatcgggcgctttcctaaaatttccacttcacgaatgacaactcccttttccgcccaattcttattgtcgctgctgtgttgttgtccactcattatagatggaagtaataaaagaactcctacaaactgcactaataatatatttctcctcatattcttctctaccgattacttccaacaaaatgctccgggaataatccctacataaaactcatccacaagttccccatctttcgtatagcgataaatcatcccctgttgctgatagtcaatggcatcagccacatagacatctccattcttcggactaaccgtcagaccataatacttcgtatcacgatacttgaggaaaggacgtacggggacacgctccgcatcaacagacatacgccaaatatctttgttaatccagtaaagttcatcacccgcaccattaagctgtacttccgaaggagcatctcccaactgaaacttaaattgtttctctattttaaatatctcggcatcaatgcaataaagcgatggctcctcatacccgtatggacttcctttataccctccgtcagtaatcgtccacatcttgaagttcttatccataacgagagaagtaggttgtatacctacagtaagctgatctaccaccttgtccgttgtagtatctatctttaatatacgattctgataagaccagcaattcacatacacatatttgccatattgtaccatctgctctgtcgatcctgtttccatcgtcatatccggacattcgatatatccggttatctgataagttttgggattgacaatgaaaatacgataatcccaaatctgtgtgacataggctttttcatccgaaataaaatgaatgtagcgtggagaagtaagtcccgtaatgcgtcccacttccttaaatgtattaatatcaatggcaaaaatgacgtgagagttgtttactaccacccaaccgacatcattacgaatagtcattgactgtgctacatctcccaacttcatcgcattagcccgatagaatacttcattttctaccgttttcgtttccgggtcataataagataaggtagcattaccatactgaaagttcccttcattggtaatgaaaagaccgtctcccgtagctgagaaatcctccatctcaccataatcccatttcatacacccgacaaaagccgtcagacagaagacaataaataaaacagatagtaaaatacgtttcataattaaaagtgagaaaaggttattaactaacttgtcgcatcactcattagacatctgccagcaaattataatttgcgacaaacatcaaacatagcatttgtaccgaccggttgaatgaggaatcaattgaatataggaatgaactataccagttgatttctacccgaaacccgcgggtataaatctgcagcggcaaggcaggtcttctgactcgtccccgtttatcacgccttcccagtgatgtcaccagtggcaaagaatgtgataaactcatctcccgaaagagaggacttacagcagcaggtactgtcccggatttacaccggattcccttttcatcgttttggaaggttagacaattccaaatacgaaccttgcgggtgcaaagatactataattatatttcacgcctcacttctcccctgtcttttttatcaagaacaaaagattaaagacttcttcaaattagcacattatgagcaagcagatgaaaaagagaaaagtttgccctctgttccttcctatctttcggataaaaaccggatgactcatcaaaaagaggaagaatgtctattttcacaaaagcggcttaatatcaaaaccatcaattttcaatcattttagcctagattacaagaatatgcaagcaacagcaaacaaaagaaactatatctacgatattttatcataaactaagcatccatatcaaaagagcaaacagcacaaaaaagcataataacgtacaaaataagattgcttcttaaccgaattaacattgctttataagcaaactaagattggttttaaaccaaactgaccttcctttaaaaccaagcccgccttcctttaaaagaaaatcaacctacttggtcggcaaaagctgcatatataaccatttttcctgcataacggcctccgctttccgcatattcttgcatataagtaatccatttttctcctatttcaagtatttagcttctattttcccaatagaaaatcttaaaaacagaacatttggagatggtgtcactataccatcggcatagtgacactatcctgcaagtatggtgacactatcagagagagatagtgtcaccatatccaattcctcctttcccgcccccgacaacgtaataaaaattaattagttaaaatagacatattatataaaaagataactatctttgcggtcaagaagttggttcttcgtcgctataataagttgtatttcattcgattaagatataacaaaagctatcgaagattaaaagggaatgccgtgtgaatcggcaacagtatccgctgctgtattttcccgtactgcccttgaaggacagtacagtttgtagcaatttgtcactggatgttttctctgggaaggcgctgcaaataagggaataagtcagaagacctacctcctttcggttggattttactcctgcggcatacgggaggtagttcgttgtctttttccacaggcgcttaccatgtgcggacggaagaggcttcttctatatttatacttaccgggatactgactgcccagcgtaaaatccattatcattcctgtttgcaaactaactaaaagtatgcttatgataaatggatttttaaaaacaatcgctagcttattaatgctatgtactgtcgtgtctttcgcctcctgccggaacgacggtgatgatgaagaattgggtggcgggacaacaggtcaaccaccggtaattaccttcgacaacggtacgggaatctacacagtaaagattatgaaaagcatcacaatcactcccctagtgaacgatgccaccgatcctgtatatacatggaaagacgagaaaggtaaaatagtatgtacagacctctcatacacctattcacctaaagcggaaggagaagtctatttcaaattccgcgtggacgccaagaatggttatgccgaagaagaactgcgggtagatgtagtggaaaaaatgataccttccgtatcattgattcccgcctactctacctatatgggaaagagcgtaaccctcgaatcttccgtaaatttcactgaaggagcaaagtacgaatgggtgtccattgacgaaagcggtaaaaccaaagaaacggtcggaaccgaagctacctatacgtttacccccaccgaagaaggacaattcagtttcaaacttacggttaccaacgaagacggtagcgggaatgcgtcgacttccgtactggtatcacctgagccagtgatgaatataaccttcagcagtaatcaactaaccgtccccaaaggtcgtgctgcctgtatagctcccgtcattacggatacaacaacccatgcaacctacgtgtgggaagtagacgaagtaatgcaacagggagaaactggccccacttttaccttcactccaccaacaaccggaagctatgtggtaaaagtaaccggaacagatggcgacataataaaaagtgctatccagaccgtagtctgcctgccgtctgatgaagccaaatactaccgcgcaccgtcagctggtagttcggacagtaaagtgaaagtataccacctacgccctgctccgggacaattcatagcacagatttccggacagaccgaagaagaagcctgtcgttacgctgagactcgcatgaatgtacaaaacaattatgtgtctctgggtgcatggggaggatatatcatcgtgggattcgaccacagcgtatacaacaaacccgatgttagcagcaacggaggatatgacttcgctatcataggcaatcccttcgacggtagttccgaaccgggtatcgtctacgtcatgcaggacgaaaacggagacggactgcccaatgacacttggtacgaactacgtggcagcgaaaccggaaaggcggaaacctatcaacactatgccgtcacttactaccgcccgcctacacacaatatgcccctgcaatggatcgacaaccggggaaactccggctccatcgacctcaatcctaacttcccgctatggataaaggaaaacaactatactttatacggtacccgcctgaagcgaaatacaacccggacaccgggcggaatctggcgcaatgaatcctatccgtggggatatgcggacaactggggagaagacattctcgccgagggcgacaatcacgatgccgcacccgtaggcaacgccttcaagatagaaaacgccatgtatcccgacggcactccggtcaagttgcaatacatcgacttcatcaaggtgcagaccggcatacaatccgtagcgggagccatcggagagttgtccaccgaagtattcggcttcgtcgattataagatgagcgaagctccttcaaagatagattaataatcattcattataaattcacttaattttttagacaatgagaaaagtaaattactggaaaaccctgttagtggttttatgtaccggatgcatctttgcagcatgtggcgacgacgacgatgaaaacccgttcaccggagtagacaacaacttccttagtttttcactggaaagcaatgaaaacgtatggaaagcgacgattatagacaatgagatcaccgtaacggttcccgaaggaacttcgctcgatggcgcgcaagccagctatacccttagcgagcaggcaactgttaaccccaatccttcttccgttaccgcctggggcgaagagcaacaattcacagtaacttcctacaacggaactacgcgtacctataaatatacagtacgctactccgctgtaagtgaaatcggcacattcatacttaattcgcaagctgatgtagacgctttagccgaccaccatgtcacggttatcgaaggcagtctgagcatagctacagtagaaaatacagaagaccccgtgattaatctgaacggattggcaaagattaccgaagtaatggacgacatcactatcgggcaatactataaaggtgaaaaccttgccggactggctaaactggaaaaggtgggaagtatcagcatgagaaacaatagctcactgaccgagtttgcactcccaaacttgctttctatccgtggagaactattcatagcaaacccggcagaaaacaacatcacttctataaaatgcccgcaactaactacaattctaaaacaatgctatatccaagctcccaacctgaaaagcttaaatctcaattcgctcgaaagcattccgggaaaaggagataacagtgatggagatggtacattctctctttatggcagccagcttgtttcattagatttgccggtcttaaagcaggtaggaaaaaagttcactctatcgttgggaacaaaacatccggaactcacccaaattaatctaccggaacttatctcctgtaaagaagtatctattggttatgcagataagttagaaacaatcagtcttcccaaattatccactctttcttcttttagcattacttcttgtgccaaattttcgaagttgaacgaaaccattgcaccgtccaatttggaaaagctaagtgtatcacattgtccaagcgtaacggaattggatgcaagtcaaaaagacatcaacagtatttctatcacttatgttgacaataatttcgttctaaaaggaaaagaagaaatgggaagctatgcattcacaggatatcaactacccaaaacagaaggaatctctacttttgccagtctcacggttaccactccgcttactaatgtagaactttccggtattaaacaagttacaggggaattaagtttccaagctacagcaaatgtgacattggagtcagtgagtatgcccgatttagaaactgtaggtaaattcgctactggaaatgacaataaaagatgcaactttcctaaacttacaagagtgactgaaaggttatatataaatatagaaaaaactgtaactgacctctcttatttaaattttaagagtttagagtctgtagagtttttagaaatgtatggcagcagaaataccaacataacatcacttgaagaccttttgcccaaattaaaatcgtcaaatcgtataagtattagactattcacagctctatacgattttagtctattcaaagatatagcagatgcaatgacagaagacgcccaatggtacgtacgtacttgtggtcccggaacagtaacattacaacagatgcaagaatcagcaaccggtgattttacaccggataattaatcacttaataaattacaattatgaaaaagagcatttttttcttagcagccagtgcaattatgtttgcaatgggcagttgtactaatgatgtgttggacaatgtccagcaagtagacagttcacttccgcagacacgtgctacagcgagtaatgactggacgtatgcgtatgtacttagcgaaggtacatggcatgtagctcctccctcatctccaggaaacattgttcgctatgataacaattggacgaaaaagtctaccctagaaattggagacacaggcaacgacttgattcaatacggatcaaaactctattgtgcagtaagtggtcacgaccttacagcagataatggaggaatatgggtactgaatgccaagaccggtcaacttctcacacctcaaatgaaacaatacgatgatgaaaaaaccgggcacaaagctatgccaagacacttggctgctgccaatggaaaagtatatatcagcttttattcaggggcagtgatgtctatcgacaccatgaattatgctaaagttaactacctagaactggatgcgacctattcagaaggtatctgcatcggcaaagacaacaaagtgtatgtctgcaattcaggcaatactgatgacacccaagctggtgaaggaacaactatttccgtattgccacttacccttgacgatgaaactcaaattaccgttcctaaaaatcctaagttgatagcagcttattcagccaataagatgtactttaacgtactgggtgacggaggtatgcattctgcattgtacaaattcaatccaactacacccaatgtagctccaatattagttacagaaaaagcaggtggatttgcaatcggcagtcaatatctttatacagcagatattgattggaacacaactgactataagactatcatgcaaaaagtacaattatctaatgatgatactagcgatttcactgatgatcccggatatatgttcggtttcagcgtaacagtcaatccattcaacggagatgtatgcttcggtcaatcaatgggagacgcattgtatatttatgactccgcaggaggtgattacctagatatggtaaataccggcacagccaacgtgaacgccgtagtcttcgtcaaataactttccgcatcaatattgaaaagttagattcaatccattcacctcccagcgaaactttctcgtaagggaggtgatttttcttcttttttactacttttgtcctcagataaaaacatccgtatgaaatttaaatccattatttcaactatcacgctattatgcctcctttttttggcaagctgcgtatacaataaaaaaacttctttggaagcattcaagcaagacgtatacacgcccgaatatgctaccggattcaagatactgggcgcaaagaatgcccaaagcaccttgatacaagtatccaacccgtggcaaggagccaaaaatgtaacaatgtcctacttcatctcccgcaatggtgagctcccccccacaggattcaccggaccgaccatccctgccggagcccaacacatcgtatgtatgtcttcctcctacatcgccatgctcgacgcactgggacaagtggaccgcatcgtagccgtatccggcattaactacatagccaatccctacatcctcgcccacaaagattctatcaaggacatgggccccgaaataaactacgaactattgctgggattgaaaccggacgtcgtactgctatatggcatcggtgatgcccagacagcagtaacagacaagctgaaagaactcgctatcccctatatgtatgtaggagaatatctggaagagtcaccgcttggcaaagccgaatggctggttgccctctccgaactgacagacagccgtgacaaaggcatcgatgtattcagggaaatccccaaacgctatcaggcactgaaagacctcaccgcatccgtagagcaacgccctaccgtgatgttcaacaccccgtggaacgacagctgggtgatgccttccacccaaagctacatggcacaactggtcactgacgcaggagccgactatatatacaaggagaacacctccaacagctccgcccccatcggcctggaaactgcctacggactgatacaaaaagcagactattggatcaatgtaggcacggcatccacactggacgaactgaaaaacatgaatcccaagtttgccgatgccaaatctgtccgtaataaaacagtttataacaacaacctgcggataaccgccacaggaggcaatgactattgggaatcggcagtcgtacggcctgacgtcgtattgcgtgatctgattcatatctttcatcccgaacttgtatccgactcaacctactattacagacacctggaatgaagcaacctcgtagacacaccactcttttattcatcactttgggaataatcgccgtagtcttattattaatagacatggcgacaggggacacttatatccccatccccaaagtatgggccgtactgacgggaggcgaatgcgacgagatgacacgcaacatccttctctccatccgctttatccgggtagtagtagcagggttgataggtatcgccttgtcggtcagcggcctgcaaatgcagaccgttttccagaacccgctggcagacccttatctgctgggagtcagttccggtgcgggactcggagtggcgttgtttatattaggtgccccattgctcggctgggcggatttcccacttttgcaatccgccggcatcgtaggttcgggctggatagggaccgccgtcatcttgctgggcgtagccatcatcagccggaaagtaaagaatatactgggcgtactgatcatgggagtcatgataggctacgtagcgggagccatcatccagatattgcagtatctaagttcggcggaacaactgaaaatgttcaccctgtggtcgatgggatcgctcagccacatcacagccggacagctgtctatcatgataccagtagtgtgcataggtctgctgctctccgtagcctgcatcaagtcactgaacctgctcttgcttggcgaaaactacgcacgcacgatgggcatgagcatcaaacgctcgcggacgcttgtcttcatctctacagcactgctgacaggaacagtcaccgccttttgcggccccgtaggattcatcggactggcagtgccgcacatcacccggctgctgtttgataacgccgaccaccggatactgatgccgggcaccatgctgacaggacttatcgccatgctgatatgcgacatcatcgccaagaaattcctgctgccggtgaattgtatcaccgcactgctgggagttccggttattttatgggtaataggtaaaaacttgcgtatattcaaatgattcaactcaaagacctgacactgggatacgaacagcgtacgctgctggaaaaagtctccgcccacatcacgggaagacaactcgtcgcactgctcggcagaaacggcacaggaaaaagtacactgctgcgtgccgtcatgggactggaaaagccccaaaacggagaaattatcctacacgggaacaacatcgcttcactgaaaccggaagaactggcacggaacatcagcttcgtcaccaccgacaaagtgcgcattgccaacctgcgatgcagagacgtcgtcgcactgggacgtgctccctataccaactggctcggtcagctgcaaggagaagacaaggagaaggtggacaacgccatgcacctggtaggcatggacagctatgcggaaaagacgatggacaaaatgtccgacggagaatgccaacgcatcatgatagcccgtgcccttgcacaggacactcctgtcatcctgctcgacgaacctaccgccttccttgacttgcccaaccgctacgaactctgtctgcttctccggaagctgacgcaaaaggaaggaaagtgtatcctgttttccacacacgacctggacatcgctctctcactttgcgacacaatcatgctgattgataatcctcaactctacagcctgcctaccaatgagatgataacgagcggacatatagaaagactgttccataatgagtcggtaacattcgacgcacaagccatgaaaataagaatcagataaatatcccatatcctgattaaacaaaaacaagcatgacaggcggaaattatcaaatgataattttaatctccttccatccatctacctttgcagatgttttcaacaaactaaaaataaaaagttatgaaagatagtattgatttcggtagtatggacatctccatgttgtttcgtaagttattagttcctacggtactgggaatggtattctcagctatattcgttattacagacggcatattcgtaggtaagggaataggcagtgacgccctagctgccgtcaatataacagctccactttttatgatcgcaacaggcatcggactgatgttcggagtcggaggctcagtagtcgcttccatctatctgtctcaaggtaaacgcaaggcggcaaatatcaacattactcaggctcttgtattctctacgttcatcgtattagtgatgtctgctttatgtttttgcttcgtagggccattgggatgcttactcggaagttcagacagattattgcctcttgtcatagaatatatgatctggtatctacccttcctcgtattctatgagttattgagcacaggcatgtttttcatccggctggacggatctcccaattatgccatgatgtgcaatgccatcgcagctatattcaatattatattcgactatattttcatctttgaatttggctggggaatgatgggtgctgcctttgccaccagcctgggaacagtagtaggtggattgatgactgtaatctatcttacgcggttctcccgcaacattcatttgcatcgcatcaagctaagtttgaaaagcctgatgctaacgctccgtaacggtggctatatgataaaactgggaacttccgctttcatcagtgaggcttccatcgcctgtatgatgtttttagggaattatgtctttatccatcatctcggagaagacggagtagctgcgttcagcattgcctgctacttcttccccatcatctttatggtgtacaatgccatcgcacaatccgcacagccgattatcagctataatttcggtgccgggcaaccggatcgggttcgaaaagccctgcatcttgccatccgtacagctttaatttgcggaatcagctttttcatcatcacgtttctatgccgtcagaatattgtttcgttgttcattgaccgaagctgtccggcctttgatattgcggtcaatggcattccttattttggggttggattcatattttttgccgccaatatgataggcatcggctattaccagagcatcggacgaggtcaacgagccaccatcatcactcttctgcggggagtggtattcatgctgatcggattctttgtacttccacttgttttaggagtaccgggaatatggttggctgttccgttggcagaattgttaacgactctctatattatcggaatttatttcaaagatcgcttcatggtccaccgactatgagtatatttgcaacatggatgcattcattaaaaaactctgcgacaaatataaagtattggaaagtgacgtacagaccttactaggctgtatggaggaagtacatttcaaaaagagagacctcattgtacgcgaagggacaaagaacagcaacctttattttataaaaacgggaatatggcgggcatattaccacaaagacggagcagatgccaccatctagttcgcttcagacggagaagcagctttctccgtctagggatatgcagacaatgcttattcactgattaatattgaagcaatgtgcgacagtgtagcctacagtatatcccgcgcaaccttgaatcaattatatcattcttccatcggactagccaatctgggactgcggctgatggatcaccagcttcttctgcaagaaaactggctcatcaactccggcagtccacgagcgaaggaacgttacctgactcttatcaaggagactccggaactgttgcaatatgtgcctttaaagtacattgcatcttatctgtggataacaccgcagtcgctgagcaggattcgggcatccttataatcttcacttttttatgagtataagatcaaatatttctctcaaactcaagtgaataaataaaactatccgcacgataatatcctatattccattccaacggacacccttcgggatcataaacaaaccttttacgcaccaaaattggatctccgacctttatctcaagcttaccagcaatgtacttgtcagccagcctggcactaatatcttctttagaaacttttgcaatagcatgataatctctttccaatatctcataaagaggtctggagaaatcctcacttcctgttaaacctattttaggattaaaataggatataaagtacacgaaagggtattcttgatttccacgtaaacgctctaacttcagtattctttttacatcaggagcattaaaaaaaagggctatatcatctgtaggctttgtccagctaacatgaagttcataattcattggtacaattcccaaagttttcatttcctgtgtgaaactcatccaattctgagctttggaacatacagctgaatttacaacaactgtacctactccctttttcctcatcagcaatccttcgttcacaaggttattaatcgcctgtctcaaggtattacgagatatgcccaattgtttagacaaatcaatttcatttggaagcattttaccttgtttatattcctcccctttgataatagtcctcaactgttcttctatctgaagataaagggggattgcgctgttatggttaactaatatcttcatgattaacttttttacaaagataaaaataaaaataaaaacaggcaatactttttgttcttttcaagaaaaagaatacatttgcaaatgtttatatgttcagacatactaattaattaaatcataataactatgaagtattatttgggaatagacataggtggtacacatataaaaggtggaatcgtcaaccttctaacgaatgacattcatcaaaacatactatctcacgaagaactgaatgccacagattcaacatcaagcatcattacgaaagtcggaaaagttattactgacattcaagcctatatgcccctatctaaattaggcggaatcggtatagccatgcccggtccttgcgactatgccaaaggtatagttgccatttatggtgtgccaaagtttcagtcacttttcggtcttaaccttaaagaagaaattaaaaaagtatctgacctgaatactgttttcataaatgacgcatccgcttatgcccttggagagtattatgcaggagcagcaaaagacacaagtagaagcattatagtcacaatcggcaccggacttggaagtacatttcttgaaaatgatactgttttgaacgaactgacagaaggaatacctgaacatggatatctctacaacataccttaccgagacggaatggcagatgactttttttcgacaagatggtttgtaaatacatggaatatgctatttccagataaaaaggtaactggcgtaaaagaaatcgcactacgcgcttcgaacggagacaataatgcacagtcattatttgaaaacttcgcttcaaatttcgtagaattcataaccccattcctgctaaattttaaaccggagaaacttattataggaggaaatatagcgaaagcttctgacttctttttagataatattcagtttcaattaaagaaactcaatttaatcactaaaatagatatctgtaaattatgggatatgtcgccattaatcggatctgctatttacacaagcaacatacttgaaaatatggaaaatacaaaagagaaaagacacacacagcaatttattgcacctactaactctactgccacctcatcaggagaatatgatatatacccggcatttccattgggaaaaggcaaaattgggaaaggtataaaccaactagctgactggatagaaaagcattcccaaataaaaatagatggttatattggagtcttttgggatgaattaatcattaagttaggagaagaactcagaaaaagaggaaagaatgtgcgattctttcattccagtgtagcaatgaaagatccacagactattgaaaaaatgattgctccttatcttggaggagataatccgttattcggcaccattactgataagcatttggttaattggtttgatgaaaataagcttaattccatacaacctgacccggaagcagatttaaatatatttataggtacaggagcagccctatctcaatggaaagctcccctgatttatattgatattcctaaaaatgagattcagtttagaatgcgcgccggagccatcaataatttaggattagattatcgaaaagacaatcaacaggcttacaaacaactatattttgtagactggattgttcttaataagcacaaaaagcaatgcctgcctctgattgacctacttattgacggacaaagagaatgggatgaactattaatgatttcaggaaatgacctacgagaaggattgcacaaaatgagccgcaatttcttcagagttcgtccatggttcgagcctggcgcctggggaggacaatggatgaaaaatcatattcaaggattaaataaagaagtaaataatctggcatggtcttttgaactgatggtacttgaaaacggactaatgctggagagtgacggatatcggcttgaagtatctttcgattttcttatgtatagtgattatcagaatatattaggagaatgttcggaaacatttaagtacgatttcccgatacgtttcgactttctagacacctttgacggagataatctttctatccaatgccatccacgcccccgatatatacaagagcattttaacatgccattcacccaagatgagacatattacatattggattgtaaaaactcgccatgtgtatatttaggctttcaagacaacatcgtccctgaggaattccaatataccttggaacgaagtcaacaaaaagcaacgaaggtagagatagaaaggtttgttcaaaaacaccaagctaaaaagcacgatttctttcttattcccaatggcaccatacatgcttcaggaaaagattgcgtggtattggaaataagtagcgcaccctatattttcacatttaaaatgtacgactggatacgcatgggattagacgggaaaccacgacctctaaacattcaacacggaatgaataatctatattttgaaagaaaaggggaaaaagtaatccaggaattgatatgccatccatatatcatgaaagaaaatcaggagtgtactatagagcatctacctactcataaagagcatttttatgatgtatatcgttacaccttcaaagaccgtattcaaatgaatacagaaaatacatgccatgtatgtatgatagtagaaggagactccgtttgcattgaaacagaggacggcatgaaacaacgctttaattatgcagagacttttgtcatccctgctgctgcccgatcatatacaatcataaatgaaaatcccgacaaaagaataatgttggtaaaagcctttgtaaaaaaagaagttactttgaaataatgtcttaataaaaacatcttatccaactactatgaaacgaactattgtacaaattatctttttcatatattgtattgcgaatgtatatccacaatacagcacaatctggcaacttggcaaaacagataattcatccaaggagtttgccttagcaccggatggaaaagatcgatttattatctccggatttggggataataaaaaatatttttatgcaggcgaacacacaccggccgattttccatacattataccggggcctactgctgaatgggctggctcatcttactgggcaggacaatgcaggatacaacttcctattttaataaaactatccgatgtcaatccgctaaagaaatatcaatggaatatttttatagagaatgtagaatacgaagactgtatgttcttaagactggaagtcaacggaaagaattacgattctcctataaagcctggcaccaaacagctaacatattcaatacagcccggaattctaaaggaagggtacaacaagattgtaatgcagttattcaacggtaaatccctaacttttgacgccatttgcctaaacggacctcaagagacacaaatcaataagataggtgatactcctattatttcaatgaaaatggctgattatgaattagaacaagggaaaacaagaacacagcctcttctactgaaaactataactaaaaaatccggaacacttaaaatacaaatcaaccaaaagaagatattcaaacaagtagaagaaggagagaatatctacgaaattccaaccggaaaacttaaagaccagtctaaaatcaaagttaaaatatcaacagaaggacaaacagtagcaactcaagaatttatccgtagtaaccagcaactacgcagatcaattgattatgttgatcagtttgctggttccagtggttcacgatggatgataggccccggaccatggatgccatttggaatggtaaaatttatgcccgataacgaagatgcccattggaaagcaggatatgaatataacgttgaaaacataatgggattcagccacattcacgaatggacaatgacaggactcttaatgatgccaactacgggagatttaaaaatacaacccggaacagaaaaacagccggactatgggtatcgctcccgaattaataagaaaaccgaaacagcccgaatcggttattattctgttaatcttacagattataatatccaagcagaattaacagcaactacccgcagttcccttcagcgatacacattcaacaaagtagagcagccacgaatactagttgactttttctttccagcagaatacgactggaatttagatgatgtatacgtaaaaaaagtatctgacacagaaatagagggatggaccttgaacgattgccggtcaacaggataccatggagtacaaagatataaattacattttgtcatgcagtttgataagccattcaaaacaatgaatggctggatacgaaacaaagtatatagccaaattgaacagctacataaatcaaacatgaagtcccgacaggtatttacagtcgaaaataacagtcaagacaaactggacgcaggaatcttcctcgactttaaccttaacactggtgatgatgttatggtaaggacaggtatttcattagtaagcattgataacgcacggctaaatctggaagaagaaatagcgagaccattcggatggaattttgataaagttgtcaccaatcaacaagatacctgggaaacacttttccaaagagtcagtatcacaacagacaattacctcttaaagcaaaaattctacaccaatctttaccgttctatcagtccacggaccatctggaatgatgtaaatggggaatggatagatatgaacggtaacaaagctcttatagacaagccaggtaaaagcgtatatggaggtgattctgcttggggaatgcattggacattaggtccattttataatcttctctatccggagtacatgtccaattgaatttacacttacgagcagttctatcgtcgtggcggctggcttcccaatggtaatcccggtatgaaatatttcagagtcatgataggcaatcctgctttgccattgatagtctccggctatcaacatggaattcgtgacttcgacagtcaactcatgtatcgggcattaattcaccaacaaacagccactatgataaactatcccggaggaggacaagtcggtaacgaaagttatcccgattatataaccaaaggttatgtacctctatacgatgacgcatgggattggaattctccgcattatcaatcatacgtttccaatacaatggaatactcatatcaagactattgcgctgctcaatattttgacgctcttaataaaaaagatgacttcaatacatttatgaaacgttctgataactggaaaaacatattcgacccatcaaccggatatgtacgcccccgacgtcccaacggagagtggatcgaaaacaccaacccatatcatgctcccggattttgcgaaggcagcgcttggcaattcacctggtacgttcctcatgatgtaaaaagcctcatcaatttaataggagagcgtcaattcatcgaccggctgaatgccggatttgcaacatccgaaaaagtaagcttcaatgctttaggagataatatgggagcttatcctattaatcatgggaatgaaacaaatatgcaggcagcttacctcttctcttataccagtgagccgtggcacacccagaaatgggcacgtgctatacaagaaaaatattatggaatgggtccccgagacgcctatccgggagacgaagatcaaggccaaatgagttcttggtacatcttaagcagcataggacttttccaaatggatggcggttgcagcaaagatcctgtatggttactggggagtccgcgatttgaccgggtagaaattctgttagacaacacctattactctggaaaaaaacttatcataaaagcagaaaatgtatccaaagacaattgttacattcaatatgtaagattcaataacaagcgccttagtaataactatatagaatggagtaaactcaaaaaaggaggaacacttcatttcattatgggtgaccgaccaaatccaaatgcatttaaataaataaacacatatgaaaaataaaagtaagatactaccagttctttttggtttctttattatggggttctgtgacttagtaggagtatcagtcacctatgcgaaagattatttcagttggagcgaaacccaagccggtttcctgccatcaatggtatttatatggtttttactcatctctattccgatttctatctggatggacaagaaaggtagaaaaacaatatcactgataggacttttatctacttttattggaatgttacttccattacttacattcacacagacagcctgttatatcgcctttgcacttttaggcataggaaataccatccttcaagtgtcacttaatcctttattaaccaatgttatcgctgaaggaaaattatcaagcattatgacagccggacaattcatcaaagcactatcttcttttgtaggacctatagtggccggattctgctctgtttatttcaacaactggatattaatgtttcccatattcgccgccattactctaatttccggaatctggttatttttcactccaataaatgagaaagacgacaaaagattaacatccagtttctatcaagttatttctctcctgaaaaataaaaccatctgccttttattcggaggcatcatttgtattgttggcttagatgtaggaatgaatgtatttaccccaaaacttttaattgaaaatgcagagttgactaaagaaatcgcaagttatggtacaagctggtattttgccgctcgcactttggggaccttatgtggtgtaattctattagcaaagttttccgaaatttattattatcggatcaatatgttcattgtattaatagctttgtcctgcatttattggatacattctcaatatattattttgttattagtatgcattatagcctttgcaatgtctagcatatttgccgtcatctactcgctagccttgcatacattaccctataaaaccaacgaaatatcaggactcatgataactgggatatccggtggctccatcattcctcctctcatgggagtttgcgcagattataccgaaagccaatcaggctccatccttgtcatgctaatttgtgtaatctatctaattttatgttcgtttcataaatttaaaaccatacacacaaagccgcattaacatttattctcaaaacaaccattcatatataaatttatattaaataaataaatctttctagttttcctgctttaaatatatatatttgcaatatgtatatacatatagacattatataatacatatatcataagcaattaatactatgtagattaaaatatacagcctttatatacaagaaatcacattaaatctaatataaaacccttatgacttactttttaaaatcacagagtatgaagaagcttttatgcaacttaccacgcttcgtattatggatagctttccttctaatcattgaaagctatgtaaccttgcaagctcaaaccagtagtagtaacaactcatccaaagcaatatcagggaaaattgtggatgaaacagatttgcctattgcaggagctactgtacaggtgaaaggatcaacaaaaggagccatttcggatatagatggcttatttactatttcatccgaaccaggctctattttgattttctcatttttaggataccaatctattgaatacaagatagataaagtacctcaaaccattaaacttttgccaaaggtagatgaattggatgaagttactgtggttggttttgctaaacagaaaaaagaaagtgtgattggagcaatatcaaccttaaaacctgaaagattaaaaattccaaccagtaatctgactcaagccttaggtggtaatgttgccggaattatatcttaccagttgtccggtgaacctggaaatgacaatgtggaattctttattcgcggtgtgacaacttttggttactctaaaagtccactgatattaatcgataatatcgaatcatctactactgatctttccagactgtccgcagatgacattgctgctttctctataatgaaagatgcaacagcaactgccatttatggtgcacgcggagctaatggagtcattttgattactaccaagcaaggcaaacccggtaaggtaaaaattagtgccagagtggaaggttcattgtcagcacctacaaaaagaatagacatggtagatcctatcagctatatgaaataccacaatgaagctgtactcacacgtaatccgttagctgtccggcctcataccgatgagaaaatagcatcaacaaaagccggcaaaaatccctatgtatatccggcggtagactggtacaatgaattatttaatgataatgtatttaattcacgtgccaacatcaatatgagcggaggtagtgaaactgccagatattatgtttctttaggcatatcggatgacaatggtatcatgaaggtagataaacgaaacaattataacagtaacattgatttaaaaaaaatctatgtacgttctaacattgatattgatgtgaccaagacgactacattttctgtaaaattcagtggcaattttgatgattataccggtcctattgtaagcggcaatgatctataccgaagagcaatggcaacaagtcctgttttattccccaaatattatatgcctgatgaaaatcatacatctacttcacatattttatttggtaacgcaggtgatggtaattacatcaatccctatgcggaaatgatacgtggttacaaacaatacaccaattcggttatttctgcccaggcggaattaaatcagaaattagattttataactccaggacttagtatcaaagtcttcgcaagtactacccgaaattcatacagcggacaacaacgttctacttcacccttttattattcaatcagctattatgataaactaaccgacacatatactttaagggagctgaaccctaatggtggacgggaagatttggattatacagcagaagggaatcaagtcagcagttcgtattattatgaagcatctctcaactacaaccgtacattccgggaaaagcataatatcaccggattattagtaggagttctgagagagaataagagcggaggcgcaagttcgatacagacatctttaccagcccgtaacattggattatcaggtcgttttacatacgcatacgacggacgatattttgctgaagcaaactttggttacaatggttccgaaagatttgccaaaaatgaacgattcggactctttccttcgataggagcaggctggatgatctccgaagaaaagttttggaatcaagaccttaagaatattatcaataaactgaaactaaaaggaacttacggtttggtaggtaacgacaatattggtgcatggaatgacagattcttttatatgtccgaggtaaatctaaacggtagtggtgcaaatttcagttggggacaagattttgaacggaatgtcggtactatcgacatgatacgctatcgaaatgacaaaatcaaatgggaaattgctcaaaaaatgaatttaggtctcgaagttgggctatttaatatatttgacatacaattcgattacttcaccgaatatcgaaaaaacatctttggcgaacgccaaaccatcccgtatgaaatgggattcagtgcacctctttatgctaataaaggagaagcttcttcacatggattcgaagtgcaggtagatgccaaccacgctttcaataaaaacttctggttaggagtgcgtggcaatttcacttatgcaacaggcaaatatgagcatgtagaagaaccctatcgtccttacccttggcttagtcatattggaaaacgtattaatcagacttatggattaatagcggaaagactgttcattgatgaagaagatattgcaaattcacctgttcagacatatggtgaatatatgcccggtgacataaaatacaaagatgtaaataatgacggaataattaatgatgaagatattgttccaatagggatttcctcttctccagaaattgtatacggcttcggagtgtcgatgggatacaagaattttgatatttcttgtttctttcaaggagcagcgagatcttctttctttattaattccaaagcaacaaatcctttcatgcaaatggatttcggaggaaataacctcaatggtatgatgcaagcatatgcggatgattactggtctgaatcgaatcgtaatatatacgctactttcccaagattgtcaactactgacattgcaaacaataacagaaacagtacatggtggttacgcgacggttcttacttgcgtttaaaatcagtcgaaatcggatatacattacctaaaaggctgaccagccatctaggtatgtccaatttgagaatctatgccagcggactaaatcttttcgcatggaatcgttttaaattatgggatgtagaacaaggaaacgacggaatgcaatatcctattcaggcagtttacaattttggtattaacttaagcttctgattacattatgaaatacaaacatttattcactagtacattattggcgatattaatcacatcctgcaactatcttgatatcgtgccggataatatcgcaacgcttgaaatggcattcaacactcgggctaatgctgaaaaatatttagccacctgctataacttcgtacctgcagcagccaatcttgatcacaactccggcctcatctgcggtggagaaatgtggtatctgaaaccagagtcccactactataaaaatataacctcattcaacattgcacgtggtatgcaaaactctaacgaccccttactaaattactgggatggaggtcagggaggctacaacatattcagaggaatccatgaatgcaatatttttatagacaacatcgatcgcgtacctgacatgcgtatggaagagaaaaataaatggaaagccgaagtgatgactctgaaagcatattatatttattatctcatgttgcactatgggcccattcctttacttaaagagaacatcagcgtagaagcagacttagatatgatgcaactggagagagaaacgattaatgatatcgtcacttatacaactgatttattggatgaagccatgaacatcccttccggattaacattcaatgtgacttctccacgcacggaattagggcgtatcacattacctattgcgaaagcaatcaaggctaaattactaatactggctgccagtcctttattcaacggcaatacgatgtatgctgaatttgtcaattcagaagggatacctttcttcgaccaagagtataaaaaggaaaaatgggaggcggcagccgcagcgtgcctggatgccatcaacactgcccacgaagccggagcttctttatacaaatttgatgagaagctaaattatactccttcatcaactttacaacaagagttgacactacgtaacacaattaccggtcgtttcaattctgaaataatatgggcattaggttccaatgcaacagatggaatacagaatctatgccaagcgcatttaaccagctattcattggggaacagaatgattcgtagttgctcacaacttgtgccgtcattagaaattgtagaacaattctatacagcgaacggagtcccgatggatgaggataaagattatgaatatgaaaacagatataaactgacaacaactccagaagatgatcctattcattttacaccaaactacacaactatcaagatgcatttaaacagagagcctcgtttttatgcctatattggttttgatggtggaaaatggttctccatcgaatgctgtaacgacaatgaaacgagctcctatcctatcaaatcaaagaaaggagatattgccggcgtttcagacgaactatattcaccgacaggttatttcacaaagaaattggttagttatcaaaacgtaaacaccagtgcgaccaatatcaattacgtatattctttcccgattattcgcctgtccgatctatacctgctatatgcagaagctctcaacgagcttaatgaaactccgactacagatgtatactactatgtacaacaggtcaggaataaagccggtctggatgaaggaggttctttggtaaatacatggcgtaatcattccaaccgcccggataagccaaccacccaaagaggaatgcgtgaaattatacagaaagagcgaatgatagagcttgcattcgaaggccatcgttaccatgatgtacgcagatggaagttaggctctacatatctgaatactcagataaaaggctggtcggtattagagcaggacccggagtacttttataatgcacgagttctcttcacgagaaaattcatgccaagagattatttatggcctattaagacaaattctatcaacagaaatccgaaacttgttcagaatcctcaatggtaacttttaacataaaaatgacaaagatgaaaaatatagcttttatacttttaatacttgcagcagtttgttttgcaaactgcgccggtgattacgaggccgaaccacgcggtacgaatgatggaaaagctccggcaccgattactaatatatcggtgaagaatgtaaacggaggagctattattaaatatactccttccgatgatgtcgatttattatacgtcaaagctatcttcactaatacccgcggagaacagcatgaagtaagatcttccatgtatgtagattctttggtaatagaagggctgggggatacacaaaagagagaggtcaaactttactctgtagaccgccacgaaaactattccacaccggctatcgtgactattgagcctctgactcctgcagtcgttcagacacaagaatcattaaaagtgactgaaagttttggaggtttcttcctcgatttcaataatgcagcaagaagtgcattatctttctacatttacaaatgggtagatgagcacaatgaatacgagatccatgacgtatactcctcacaacaggaagaaggccgcctgactataaaaggcttagaacataaattattgaaattagccatcttcgttagggataaatgggaaaacacttccgacacattgtatgccgaaattactccttggaaagaaagcttattagataaaacaaaattccaacttgtcaaagttatggatgatgtcagctgggattaccacgaaggttatcattcccgtctatgggacgggcaaataggtggatggaactggggacataccgaatacccgatacctttcccgcatgccttcagtattgatttgaatgtcaatgtacgtctcagccaattccaattctggcaacgtctggacagccaagacttattatatgcccatggagctcccaagtacttcaaattatatggctgcgaagagggtaaagatttgcagaatccggataactgggtggtattatttgatggagaaatgaagaaaccatccggcggggcatttggtgatgcgcttactcaggaagatattgaggaagcccaaagaggccatgtatttaccctcaaccaagatgtaccattcattcgctacttccggttccagagtttaatgtcatggtcgggaatggaaacatcagttatgtcagaaatcactctttggggagatatccaaggtgaagaataaccttataaaatagccagaaatgaaaaaagtaatatatataataactactattctcctgtgtatgacctcctgcacagatattcatgatacctattctgaatatatcaaagacggagaacaaatttatgtaggaaagctggcggatgtaaaaatacatccgggatttcagcgcatgatgataacggggtctatgaaatatctagccacagcaaagacttgcataatagaacttgtaggttacgacaaggttttcacaacagacattgacagaacgcaacctgaattcagttatgaaatcaaagatgtggaagaaggcaactattacgttaaaataaccacaaaggataaagaaggtaatacctcactatccgaaacctacaatgtagatgtatacggaacggagcacatagcgacttattatcccaagcgaattaccgatatacaattcgtcattgccgacaactcgctcaacttaatttggaatcaggcagacaatgtggtggaagcaatagttaagtactatgattcaaatgagcaactactaactttaacagtgaaaggagatgctgcttcaaccaatttacctgattggaaagctacttctatattaacagtagaaacacgaatcctacccagcgaaacagcattggatatcgtatccctgcccatttcagaatacactttgcccgacgatccgattgtagaaatccccagaactaactttgccaacgcaaatatgccttcagatgttgtaaacggttatggcggttcagtagaaaagttatggaacaatgatacatggaattatgacagcggttatcatgccagcgataatcaaggagttcctcatcatctgaccattgacatgggacttacagcaacgattaccgaatgcgaactgttctttaccggatatgaaagaacagactggatgcctcgattattccaaatatggggaattgaagatgtagaagacctggaaagccatgaaccggatgttccatctataaacccggcttgggaagaaagtgcgaaagcaaaaggatggaaacagctgactacaaaaaacatttctgtttccggttggcaacccagtattaagttcgcctgcgataaagaacacgaaaatataagatacatcagataccgtattgtagaatcactctcagctccacacgtaggaatgggggcctatggttccgccagcgaaatcaagttctggggtaaaaaggttagtttgttacagtgataacagttgaatttgtttttgcataggagtgtatacaaaaaaagaatgatacattcctatgtaaaaaacaaatttgtatcttgaatccaaaagaccgaaagttaatatgaaaagagtaccattgagtttattcacgtttttattcctcctatccggattatgtgcagcacctaccaagactgtctggcaaatcggggagaaaaatcatagtgccagtgagttggcattgtcccctgacaaatacaaagagtttttggcaaacgattttggttgggaggacaggttttatatcattggattgtcttcccctcaaaaagattttccttatgttctgccggggcctgccgatcattggggaggaacaagttatactgccggtatacggactcatgttttaaacatactctttggtatgaaggaagttcccgaaacggactcatggaaattaatcatagacctattagatactcaccacgaatttccggcactatttaaaataacgatcaacggaaaatcatggaaatatgcccttcccaaaggaagtggaaaatcaatagacggtgactattcacaaatcaaaccgcatacgatcgaaattcctctgaactccggagtgatcagaaaaggaagcaactccatcgcgcttacaagtctcgaaggctcatggattctcttcgatgatatcagacttatggggccggataatgctgaactaaatgaagtcaacaaatccgtttatctccgggatgttaaagctgcggactttcaaaccaccagtcctgtagcccaaccactattagtagacatagaacatctttccgggcatcctctccttgaagtgaaagtagatggaaaaaagatactggaacaacgtttggaaaaaggaagatacatactagaagctccgatgccagttgtcaagtctcccaagacaagccattacatcatatccgccgatggtgcaatcttagataaaggaatgatcagacgcgcacctcacaatacaatcacactggccgattacatcgatacacgaatgggaactgcgcactcccgttggatgatagcaccaggtccgtggatgccattcagcatggtcaaattaagtccggacaatcaggatagcggttggcaatcgggatatgatccttcattcgagagcataggtacgtttagccacatacacgaatggaccatggcgggtctgggcatcatgcctgccaacggtcctttaaaaacggagataggcagccagtcttccttagtcaaagatgccaattcgtatcgttcagccatcgacaaaacaagtgaagaaacgaaagtcggatattataaagtagacttgaccgattatcaaatcaaggcggaactgactgccacctcccggtgtggttttcagcgttatacatatccgcaagataaggatgcccgtgtcatgatcgacctgaaaatccctagtgaatacgattaccaaattgttgaaggaagtataaagcaaacaggagcacgacggatcgaaggattcagcaagcagctatccaaaaatgtatggtcggcggatgcggatcagaactatacaatttatttcgtgattgaattcaataaagatatcaagaaatttggaggatggcacgatcatactttatgggaaacagatactatgacagccagctaccctcagcgattcggctgttatgccgaatttgatactaccgattatccggaagttatggtacgttccggaatatcttatgtagatatggcaggggcttccaacaatctttccaatgagataacggaaccattcgggtggaattttgaagctgtacgcaaacatcagtcggatagttggaataatattttaaacagagtccggatatacagcaacgattatcgggaaaaggtaagattttacaccaatttataccgtgctttctgccggaatactttcagtgatgcagaccgcagatgggtggatgcagcaggcaacattcaaaagctggacgacccggatgctgtcgctttgggatgcgatgccttctggaatactttttggaatctgaatcaggtatggaatctgattgctcccgagtggtcatccagatgggtaaaatcgcagttggctatgtatgacgccaacggatggctggcaaaaggccccagcggaatgaaatacatacctgtaatggtggccgaacatgagattccccttttagtaagtacttaccaaatgggaatacggaattacgatgcagaaaaaatgttccgggcaatcgtaaagatgcaaactaccccagctcaacgtgtagccaatgggtttgccggcaacagagatttggaaacttatctgcaacatcaatatgtacctgccgacaaaggacgtttttctaacacattagaatactcttatgacgactggacagtctctcaactagcaaaagcactgggaaaagaggaatattaccgaacattctccaacagaggcaactggtggaaaaacgcaatcaacccggcgacaggttatgcccaaatgcgctacagcaatggagaatgggaaaagaactttgatccgttcaaatcaggagctaaccatcattatgtagagggaaacgcctggcaacttactttttttgtacctcagaacgttcccgcactcaccgaaattatcggtaaagagctcttcatcgaccggctgtcatggggattcaaagccagtgagccatggaggtataatgccccgggagaccagtattgggactttccagtagtacaaggtaaccagcaatccatgcacttcgcctttctattcaactgggcaggccaaccgtggcaaacgcaacggtggagccgttccattatcgaccgctattatggctttgacacatcaaatgcctatttgggagacgaagaccaaggacaaatgagcgcttggtttgtcatggctgcattgggattattccagacggacggaggttgtaacgcagaacctgtttatgaactggggagtcctctgtttgaaaaaataaaaatagatttgagaaaacatttcggtagaggaaagcaatttatcatcaaagctagcaatacttcgcgggaaaataagtacatccagtccgccaaactaaacggcaagaagttgaactcttttaagtttccggcaaaagaactgctcaaaggcggcacattggaacttgaaatgggagatcgtccgaataaaaattggggaatcaaataacatcataaaaaaaatagtaacaaatgaaaaagatcctactcagtcttatcacagcagccattttattatcatgtcagtcatcacatgacacatcacacaagtatacagccatcactccgggagtagaatggctcgacaccaacaacgagaaaataaatgctcacggaggcggtatattatatcacgagggaatttactactggtatggcgaatgtaaaagtgattccacttactggaatcccaatgttcccggttgggaatgttatcgtacggaagccggtggagtaaattgttactcttccaaggaccttctcaactggaaatatgaaggactcgttctccaaccggaaatgtctgacacacaatccgatctccatccttccaaagtgctggagagacctaaagttatatacaatgacaaaaccaagaaatttgtaatgtggctgcacgtggacagtgacgactacaataaagctgctgccggagtcgctgtttccgattcaccgactggtgttttcacctatctgggttcgatgcacccgaacgggcaaatcagccgggacatgaccctattcaaagatgacgacggcaaagcttatcatatctactcttccgaacagaattctacattatatatcagtttgctgtccgacgattacctgaaaccttccggcactttcacacgcaatttcgcaggtaaattccgggaagcccctgctgtgttcaaacacaacggactatactacgtcatcagttcgggatgtaccggctggagtcccaatgaagcggaatatgcagtggctacccaaattttaggaccatggaccgtaaaaggaaatccttgtataggaaaagatgccgacaaaaccttctatggacaaagtacccatgtactgccgattcaaggaaagaaagacgcatacatagccatgtttgacaaatggaataaaacagacctaattcactcaacctatatctggttgcctatacagttccgtgaagacggaagcatggctattcaatggctggatagctggtcacctgatacatacgaattctaattaagatatagcaacggcatatcattttctaaaaggaactcacatgagaaagataaaaattaaagaaatcgtttgtatcatcggattgttgggaactctcacagctcattctcaaaatacagtctggcaaataggaaacaaagataaatccgccaaagagttcaagttctataaaaacgattatcggaactacatcaatgatgtttatctatacgaagtagggagaaatcattctgctgattttccttactttctgccggggcctagtgatgcctgggcaggtggcatatcagggcaggctgttattggcttttcattggccgaagctccttctccgacaacccaaatacaactacgacttctatttgcagaaactcatccttcctcacctccccgactggaggtgaggctcaacaggttcgagaaatccatccaaacacccgaaggcacaaatccagaatatctgaacacaaaagaaacagcttcaaaagagttatccgtcacacttgacattccggctgatgagttcagagcaggaaacaacacactcacgatccaaaacatatcaggtagttgggtagcattcgaccagataaagctgacatctgactctcctctgcaaacaaacaatcttacgaccaaagccagtctcgtatcttccgccttctctcctgtattggtggtcggaaagaaaaaagaactgagacagccggtcaaaataaaagcagtcaactggcatcataaaaagagaccggtggaactgcaagtcggtaatttcccaccggaaagatacgtattgtcccccggaataaataacattgagacatccattccggaagtcaccgctccatgtgagttaccgatcatactgaaagaacaaggaaaaaccgtcagcaaaatcaatgaaaaggcaactcctgtcaagaaatggacggtatatctcgttcagcatactcacacagatataggctacaccaaacctcaaaccgaaatcctgtcggaacatctccggtatatagattatgccattgaatactgcgaacaaacaaaagactacacaaatgatgcgaagttcagatggacctgcgaatcggcatgggctgtagacgagtatttgaaaaacagaccggaagaacaagtgaacaaactaaaaaaatacattgccgaaggacaaatagaagttgcttccatgtatttcaatatgtcggagattgtagacgaaaactctttcaagactttccttcagcctgtcaaagaattcagaaaacatggaattccctctgcgctggccatgcagaatgacgtcaacggaattgcatggtgtctggcagattatctgccggacctcgggataaaatacctgtggatgggagaacaccattacaaatcgcaggttccgtttaatatgccgactgtcttccaatgggaatctccgtcaggtaaaccgatcctgacttaccgtgccgaccattataatactggcaatttctggggaatagagcagggagacattcaaaagacagaaccgaagttactacattatttatcagaactggagcgtaagcattatccgtttgatgcagtaggcgtacaatactccggttatttcacggataattcaccgccctccatcattgaatgcaaactcatcagagaatggaatgaaaagtacgcatatcctaagctacgaagtgccactgcatccgaatttatggattatgtaacggagcgatacggggataaaattcccgcatacagagccgcatatccagactggtggacagacggtttcggttctgccgcaagagaaacagcagcttcacgcaaaactcattcggatatgacagcggtagaagggctactgtctatggctgtattaaaagacaaatgcctgccacaggccactcatcaacaaatagagcacatacatgaaagcctgctattctatgatgaacacacgttcggagcatccgaaagcgtcagtgatccgttgtgcgaaaacagtcaggtgcaatggggagaaaagtcagcctatgcatgggaagcagtcaaaagaacacaaatgctgtatgaaacctccgtcggtttacttcaaggagacctccgcagaggcaagaacccgacccttacgattttcaatacgttgaactggaaacgttcggagatgctgactgtatatattgattttgaagtgatcccccgaaaccaattcttcgaaataacagactttcaaggacattcgttgaaagttcaaccgatccgttatcgcagagaagggtgctactatgcaattttcgcagaggatattccgcctatgggatacaagacgtttgaaattgtcttcaaacaaccgtctactgatacaggaactattacaataaacaatgccagtatcgaaaatcatttctacaaactacaactcaacccggacaaaggaacgatccaaagtttgtatgataaagaattgaattgtgaactggtcgatagttcgtctccatgggaactgggtgcttttatctatgagaaattaggtaatcgtgaccaattggcccaatatcgcctggatgattacaacagaacaggattgagtgagtgccggatcatcgacagttcgaatggacctatttatcaacgtatcctgttgcagggaaaatctccgggaacagacgaagcattcggggtcaatctggaaattaaattatatcatgataccaaacgaatagaactggagtacgcaatcaagcgtctgccggaaacggatccctcagggatatacgttgcttttcccttccaactgcccgaaggaaaactggcattcgacgttcagggcggaacagttatatctggcaagaatcaactggaagggacatctacagactggaatactgttcaaaactttgtatcggtacaaaataatcaggcgcaaattattataggaagcagcctcatccccctctatcaactaggagacataaatctcggtaaatttcaatatcagaaacaatacgaaaggcctcatgtctactcgtgggtgatgaataattactggaataccaacttcaaagcttcccaagaaggagagttccgttggagttaccatctgacctcttccgttgacccatctaacaaccttgctaccaagtttggctggagctcacgtattcctctatatgcccgggtaatgccgacaggaacagagaatcataaacccacagagtactcagccttccattttgagaaagacaatttcctgatgacttcatgtaccccctctaaagaagaaggttatatactactgaacattagagagatagatggaaagagaaccaacctcaggattttaaatgaagacgggcaaaccatccccttcacaatagtaaacgctattgaagagaaattggaaaatgaaacgtcagagcatatatttgaggggtaccagaataaatttataaagataaaacgtttttaatcaaaagaatcaaatgcgtagtctaccctaaaaaacggaagaatcatcaccacaaagagacgaggagatgtcaaaagtcagtagcaactctcctaatactattgacttttgcccctcatcatctgtcagaacgaccggaaagtatctgctccaaactttcatcgaccactcccgccaactgaagattggacagcaagcggtcataagaaatcctccctactccttccattttcagcagccatctccatccctttcccgatactaattccagcagttgccctaccgtccggatttcttctttatacaagacattagtcagcctcgtatcggccactttgccgacagacaattggagtaccctttcttcctgattcaaatttatattcttgcttttatccgccaaagactgaaaacgggcatctatgatatgtttccgataagtagccaacacattctttctcactttcagtcctctgagatgagaattataaatctgtaacgccctgtcataagtaattcgatgccgaccggcaactttctctattgactcccccatagagatggagtagaaaatatcacgggctccgggatgaacaatcaattgggaaagttcacgaataataatttcatatagaggtttacacgttttctgtgttcgcaatacatatagcagatcatcatatctggaaataataaagtcgcgttccagctttttctcttccacaatctttgccagataatccgcttgcaatccaagccttttgtgagcttcgagataggcagtcagactttcgtcatccaagaacagttggttgcccatccggcaactggtaatgtaaccgagattcgcccagtttcgcagagttgcttcctgaacgccatgtctttcagacatttgttttgttgtgagccaataggacataaaaaaacggaactaagttaatactcttacctagttccgtaccttttatattataaaagagtacggagctgtcacatcccgctaataggaggtagtaacggctacctgatgtatacgggcagacagcccgtaccctatgagaagtcatagaagtacaggcgtcttcccggcatacatcaaaaaaatccgttacaatttcctattagccgaggaaacgcgcaatcgcacacctttaaacggtatgctacgttccgatgacaaagttacaaatagttttcggaaaataacaaaagaggctaataaatgtttggggaaaattagaaacaaagcaatcgtcactattatataaattcaaaagactatgttgtaacaattaacattaccaatccatcattttatattatataaaagtagaacagaatctgaattatttcacaatatcattcagatcaaagtagagcaaacgtgtagcagaatccacatcttcatcattcaatgggacaaaaccgtttttcatataaaaaggcacagcagccgcatacgcatcaacagttaaaaaacggcaacctgttttattctcaataataaaataacttttaataaaattcaataggaatgagcctattgattgaccttttacagacaagtcaacacccaaacgacaaatctttgcagcaggatagctttttaaacgcttctcattcacaaaccgatgtttgcggaaacgattgaattcagttttattttcaaaatcagacaaagagatcctgtcattggcaagactgaaataagcaaccgatcgctgattaactttattctcaagtacataactgacagccagcaaagcttcccgatacaggaaagattcattcaaaataaaatcgttcaagtcggtatctccgcaatcgaacgattctattttttctgaggtatctagtttacgcatctcatacgttgtctctattaactgacgatccatatctattttttaaatattttcattgccagttcgtagtctttcaatctttttgcccgctgctcggaggtctccctgcgtttttctttcatccgctcttcaaaccgccgtgcatcttctccgaaaagtatcggagtttctttaatcggtcttgccatactcacctatctcctttcttcatttaatacgctacaaaagtaacctaataaatcgggaagtgcaagtaaccaggaatttatcttcgagacatatatgtctcaaatacactcactatatcttctctatatttctttatatcaaaaagagattgccgctatcttcataaaacacggaataaaatacgaaccgaccttcgatatatacatcgagaaatacgattggtagaagcagaattattctcacccctttgagaaaatattctcataggcatgagtattttttctcactgtggtgagatttttttctcaaggcgatgagaatagtttgagaactttattgcagttgccccgccgctttcaagtaagccacatagtttacatacaactgaaaatgggcatccactttcgtctgatacgcctgttgccacataacttgcgcttccagataatccgaaagagtttccaatcccacctcatactgtttgccgctgactttcatattctcttccgcctgttccagcgaacgttctgaaagctcgcattccagtcgggcctcatccaaattattagtggcctgcgtcaattcaagcaacatcttttcattggcattttcctgttcaagacgagtctgttccagttttaccttggcagagcgcaccttattcatacgttcgccaaaatgaaacagaggtactgaaacattcagaaagacggagaatgatccttttttcatcaaagtttcgtcattgatttccaatccatggaaatagtcataacttcccttcactcccacacgtggcagcagttcactccgattcagctttacctgctgctcggccatggcgatctgtttattcaaaataccatattcgggacgggcactgatatcggcaacctgtgtcttccactcttgctccacttccggaaattcatccgagatatcaatccccgctgtcagaggccgaccgatataatggcaaagattcatgccggcaagacggagcgcattatccgccttgcgcaatgccagctcactctcattaagtttcacttgtaccttcaacacatcattctgaggtttcatgccatgctggtgggcactcttcacattccgaaacagctcattgagcaacacatgatatttctccgctactttcttcatttctttggctttcactagttgcacataagccttgtctgtattcagaatcactccggatgcagtcagttcctcattcagatgtgccatttccttgccgagcaatgacattttataggcggcgcgaatctttccgcccatataaagcggttgttccacttgtactccgcctgtatagacggtcccgactttatagtccagattcaatccggggaaataagcgtaaccgcttgttgccaactctccagtaacgggatcgggcaggaataccggcagatttcctccccgaatgcccaagctgccgtctgccgtactatacagtccggttccgcttgctgtaaaattggggaagaagttagctttatagctgagagacagcagccgggctgcctccgtctgtttatcggcagcagccatttccttgttatattttagagccatttcacggcattgtttcaggctgagcttctcttgtgccgaaacagaaagagaagccgccattccaaacaaaacactaacagctacgagaaattcttttttcatttgtctgtctttttgatatgaaagaataatgcatacagaatcgggataaagagcaacgtgatgagcgtgccaaacagcaatcctcccatgatagaagctgccaacgaaccgaacatagcatcgggcaacagcggaatcattccaagaatagtggtcagcgaagccatcatcaccggacggagacgactctgggagctatcgatcaacgcagtgaccggttctactccctggctgatctgcaacgtaatttcatccatcagcacaattccgttctttataatcataccgatcaatcccaatgtgccgacaatcgccacaaaattgaatgtcttcccggtcagcaacatcacggcgactacaccgacaaaaaccaacggtatgcagcagaaaatgataatcggcttacgatagtctttaaacagcataatcagtatcgagatcatcagaataatggcaaacgggaagttcttgaacaaatactgcatagatttcgtactggcattcctttcaccctgccattgcagtttataaccgtcgggcaatgggatctgctctatctgtgcggcaatggactggcgtgccttctctgtttctattcccggaacaggcgaacactgtacacgctggctacgctgcccgttatagcgggggacgacgggatcttcccactgtacatcgatccgcttgctgatctgtttcaacggagtagttcccatcaaggtttctaccagttcgtctttcgaaagcgttcccgttttcagtttcatcatcatctcctgcgtcaacaagccattcaaagaaggaagagaagaaaatatttgtgtgttatccaaatcctcaatcggtcttccctgttcgtcaaggcagcgcagatagatattgtcccgatggattccttcgtggaaagaaccgatgggaatgccactggtggccgaaagcaacgagaggcttacatcattacggctcagtccgatagcgcgggcagtcggctggtcatattcaatggtcagcacgggaatctgcggctcccagtccgtagttatcagatatacatccggacagctttccataatgctgcgggcactgtctgccaattgatgcaaaacaaccgggtccggccccgtaaactgtgcctcgatcggatatttcttgaacatcaggttatagcggttcagtttcacgtaggcatcggggtaacgagacgaaagatattgctgaatctcgggcatattatccaccaatgcatcgggagaagtaaagtctataatcaattcaccgtatgccaaagaaggattggctatgttacgcaccaaattataacgaccgggggtaccaccgacggaagctgtgacatgggtcacttccggacgagttttcagataggcttcaatctcttccaagtcacgtgtgacacgggtataatttgttccttccggcaatttatattccatataaagctgatcgtacaccatatccggaaagaaaccctgtttcatgaaccgatagctgaaagctgaaagagcaaccaacgctaccatcgcaaagacaaaactccagcgatgagccagactaaaccgcagcaaggaacgtaggacggcataaatctttccttcatacacccgttttccggtagttgacgcttctttcgaaacttcgggatgcaaaattcggttggccatcaacggtacgtgcaccagagccagtacccagctaagcagtaacgaaaccgccagcacgataaataagtcgcgcgtatacacccctgcagtatcgggagacatgaagataggcaggaaagcaatgatagcaatcaaagtggctccgagcaaaggcatcgcagtctgccgcccgatagcggtcattgcctccatacggctcttgccggctttcagatcgaccagtataccgtcaataataacaatcgcattatcaaccagcatccccatagcaagcacaaatgacgccagcgaaacccgttgcatcgtgccatccacaaaatacaggaacagaaaggagccgaacaccgttaccaccagactgattccgataataactccactcttgaatcccatcgttatcatcagaatgacaactacgataatgaccgattcgatcagattaagaatgaatgttcccaacgaaccggatacacgttccggctggtagaatactttatgacactccactcctgtcggaagccgctccgctttcaattcgtccagtttctgttctacccgtttgccaatcttgatgatatccgaaccggaagaagccgcaatcagtattcccatggcacgctgccggtcataaaagagttcattgcgggtaggattctcataatctttctcaattcgggcgatgtcactcaaacgtaactggtcatcatcgtgcccctgaatcagcatacgtccgatatcttctaccgtcttgaacttgtcactcaccgttacccgaatacgattatcgccattatcgtagtatccggtataagtggttttattctgtccgttcaaggtagcgagaacttcggcaggtttcacgcccagattcgccatccggtcctgcagtaaagagatgttgatgcattcctcacgctttccatacaagtcaacccgttccactccgtccagttcgctgacttcccgctttatcagttcggcataatcagacagttccctgtcctgcaatccgtctcctgtcagcgcataaaacataccgtacacatttccgaaatcatctttcacaaggggagtagcagcgccttcgggaagttccgcctgtgcattcgctaccttacgccgcaacaaatcccagcattgttccacatctgcctccttgacggtcgttttcagttccacctgaatcagggagagatcattgtaagaataactttctacattatctatattccccattgtacggatattcttttcaagtacatccgtcacttccagttccacctgatgtgcggacgctccgggataggtagtcactaccatggcgactttcaccgttacttccgggtcttccaacttactcatttcatagctggaataagctcctccgactatcagcaccgcaatcaagaagtaaattaacttcttattttcaaatgcccatttacttatatcgatcatagcaatcctcccacattggttttagaagctggcaaaaggggttctacctgctccccgtctttcacatgatgtactcccgaagcaacaatcaagtcaccgggcttcaagccctccgcagtcaccaggcacctgcctctgcccagcagacgggtgactgtcacatcacaacgacggatggtccggctggaagcatcataaaggaaaacactcgccatccccttatcacgaagaaccgcacccgtaggaacggacagatgacgcacttccccttcggtacattctatagtgaccattgtattcattccgggggaaggaagcgcctgcgcttcacctttcttcaactgcaaacgcatcgtatacagttgattggcattcgctttaggggtgacatttatcagatcgagcgcatactcctgaccaggataaatgtcgaacgtacaagtgtaaccggtgaactgttggcgacggatatattctactgccggaagattaatttccacctccggtgtcccctcgctgataatggagacaacgggcataccggccgcaatagtctcatgggaatcaaaaagacgtttctgtacatatccgctgaaaggagcatacaaacgggtatattccagctgatctttcgcatgattgtacttggcggttatctgtttcaacccgtacatcgctttatcattggcgtcgggagtcgttacattctccttataaagtgccatcacacgctccgcctccgccttcacactttgatactccgcttccgcagcatccagctgaatctgataatcagcagggtccagttcggcaagcagctgtcctttgcgcacatacgttccgtcgttgacgtacatacgcaatatagttccgcttacacggaatgataaacttatatcctgcgccgccttcacccgtccgggaaattgcaaagccgtctgtccaccggcagaaagtacagtatcaatcttcactgtaggtttgctatctgtaatctgtgtacgttggctgcaagacgccaacaaaacgactaaaattcctgttaataaaaagttgaatcgtttcatattttcatttgttatttagttcatgcaaaagtatcccaagcagataaaagtaaaaaggttgatttaagctataaattgtccaatttgcagttttttcaacttaaaatcctcaaatactttgctatttgtatttatttatacgtttctttgcaacagaaaccaccccaaaagaaaagaggaaatggaacaacagataccttttagttatgttataatatctccggagaatgctacggaaaaagaaggctgtatgatatctactatagacaagtgtggtttctttttttgccagaaaggagaagtggaagttgccctgaatgacaagtcgtatttaataagtaaaggaagtgtctacatttatatgacaggcagtctcttgcgcatccagcgtatcagcaaggatataaaagggattatgctggaggtggatttgaattatattattccgatcgttaataagatagtcaattcagaaaacctgctctatctacgggaaaatccctgtttctcaattacagaatatcaatacaactatctggaacaattaatcaaagccctacaacagcgaatggatataaaagcacatgacatcccgctgcaaagacagcacctgatatccgagctcatcaaatcatgggggcaaaccttatgctatgaattgctgaacgtttattttaccaaccagcctctcaaacctttatcgcaagacaaaaaggataaaatctttcagaacttcgtcattaccctcttccgctattatcagcaggaacgggacgttaccttctatgccagtaaacagtacctttcttcccggtacttttctgctgtcattaaagaaaaatccggtagtaccgccctgcaatggattgtacaaatggtaattaccgaagccaaacaactgctcgaaaactccgatctcaccatcaaggaaattgcaacaaagctgaatttcccgactcagtctttcttcggtaagtatttcaagcaatacgtaggtgtctctccgaaagagtatcggaataaacagatcaggcagttgcctttctgaactgacggaactgccaccaaagcatccctcctgcaatcagactggctatcaaatcagagataggcatactgatccacacgccgagctgcccgtaaaaccggggaagaatcaacaggcaaggaatcagtacaagcacctgacgggaaatagagagaaagatagccttgctcgccatgccgatactctggaagaagttggaagtcaccatctgaaaaccgacaatcgggaaaaacatcacaacaatccgtaagccctttgccgagatattcaccaattcttcgtgcgtcgtaaagatagaaacagccagttgcggaataaacattcccatcagaaaaccgatggttgtaacaatggtcgcggcataaatcgttattttcagcacttgcgtcacgcgcggatactgtttggcgccgaagttatagccggcaatgggctgcattccttgattcaaacccatcacaatcataacgaaaaggaataccaggcggttgacaatgccgaaagctccgatagccagatcccctccgtgctgtttcagccccttattaataaggatgacgataaagcaggcggcaagattcatcaggaagggagccataccaatggccagagaatcaaaaacaatcttcttcttcagacggaaaatgcctttatgaaaatgcaggagttcgtccttattactaaacagcttgaactgccagagaagtgcgatgacctgtgcggtaattgtagcgatagccgcaccctgtattccccagccaaaaccgtaaataaaaataggatcgagtatcgtattaatgaccacggtagcaatcgtagcatacatcgccttctgtggatgccctgcggaacgaagtaccgcattcaggcccaggtaaagatgggtgatgacatttccccagaggataaccaccatatagtcgcgggcatagccgacagtcgcctcacttcccccgaagaagtaaagaatcggatcgaggaagatcagggtaagaaccgtaaaagccagtccgatgataatatttaataccagcacattgccaagtacccgttgtgccgtatcataatctttctgtcccagcttcaccgataccagtgtagccgctcccacacctaccagcgaaccgaaagccgctgcaaggttcatcagcggaaacgtaagtgccagccccgaaatagccattgcccccaccccgtgaccgatgaaaatactatctaccatattataaagagaagatgccgtcatggcgataattgccggaatggcgtactgcattaaaagcttcccgatcttttccgtacccagcgcagtgggtgtcttttgtcctgtcatacctattgttttgagggcgcaaagatacaaaaaagagacggattacaggatatatgagaaaagtttcgtatttttgcctccaaaattgagttaatacataacgaaatgaatatattagaactaagtgaacaggaaattattcggcgcaatagtctgaatgagcttcgtgcaatgggtatcgatccgtaccccgctgcagagtatgtaaccaatgctttctctactgatataaaagcagaattcaaagatgaagacgaaccgcgtcaagtttctgtagcgggccgtattatgagccgccgcgtgatgggcaaggcttcgttcatcgaactgcaggactctaaaggtcgtatacaggtatacatcacacgtgatgacatctgtccgggagaagacaaggaattgtacaactctgtattcaaacgcctgctcgacttaggtgacttcgtaggtatcgaaggtttcgtgttccgtacacaaatgggcgaaatcagtatccatgccaagaaactgaccgtacttgccaagtctatcaaaccgctgcctatcgtaaaatataaagacggcgtagcttacgactcttttgaagatcccgaactccgttatcgccaacgttatgtggacctggtagtaaacgaaggcatcaaagagacattcgaaaagcgtgccaccgtagtgagaacactgcgcaacgccctcgacgaagccggatatacggaagtagaaacaccgatcctgcaatccatcgcaggcggagcaagcgcacgtccgttcatcactcaccacaactcgctggatatagacctctacctgcgcatcgcaacggaactttatctgaaacgactcatcgtaggtggttttgaaggtgtatacgaaataggaaagaacttccgtaacgagggaatggacagaacccacaaccccgaattcacttgtatggaactttatgtacagtacaaggattacaactggatgatgagcttcaccgaaaagttgctggaacgcatctgtatcgccgtaaacggaagcaccgaaaccgttgtagacggaaagacaatcagctttaaagctccttaccgccgtctgcctatcctcgacgccatcaaagaaaagacaggatatgacctcaacggcaagagcgaagaagaaatccgtcagatctgcaaagaactgaagatggaagaaatcgacgacaccatgggcaaaggcaaactgattgatgaaatcttcggtgaattctgtgaaggcagctacatccagccgactttcatcaccgattatccggtggaaatgtcgcctctgacaaagatgcaccgttccaaacctggactgaccgaacgtttcgaactgatggtaaacggcaaggaactggccaatgcctactcggaattgaacgatccgctggatcaggaagaacgcttcaaagaacagatgcgtcttgccgacaagggtgacgacgaagcaatgattatcgaccaggatttcctgcgtgctttgcaatatggcatgcctcctacatccggcatcggtatcggtatcgaccgtctggtgatgctgatgacaggacagaccaccattcaggaagtactgttcttcccgcaaatgcgtccggagaaagtaatcaagaaagaccctgccgccaaatacatggaactgggtattgcagaagactgggtgccggtcatccagaaagccggctacaacacagtagctgatatgcaggatgttaatccgcaaaagttgcaccaggacatctgcggaatcaataagaaatacaaattagaactgaccaatccaagcgtgaacgacgtgaccgagtggataaataaacttaaataagttgagagttgagagttgagaattgaaagttgttacttgaacaacctttttaatgaccaactctcaactttcaactttcaactttcaactaaatatgaaactacccggtaagatagcgataatgggcggaggaagttgggctacagccatcgcaaagatgtgtctggctcaggaagactctattaattggtacatgcgacgagatgaccgcatcgctgattttaagagacttggacataatcccgcctatctgacaggggtgaaattcgacacgaagcgtatcactttcagttctaacatcaacgatgtcgtgaaggaatcggatacactgattttcgtcaccccctctccttatctgaaagctcatctgaaaaagctgaaaacaaagattaaggataagtttattatcactgctatcaaaggaatcgtacccgatgacaacgtgattgtatcggaatatttcacaaaagaatatggcgtaccacccgaaaacatcgcagtactggcaggtccctgccacgcagaagaagtagcgctggaacgcctctcttatctgaccatcgcctgcccggacaaggacaaagcgcgcatcttcgcccgccgtttgggaagcagcttcatcaagacttccgtcagcgacgacgtagccggcatcgaatacagttcggtgcttaaaaatgtatacgccattgccgccggcatctgcagcggactgaaatacggcgataacttccaggcagtactgatatccaatgcgattcaggaaatgaaccgcttcctgaatacagtacatcccctgaacagaaatgtagatgattctgtttatttaggagacttattggtgacaggatactccaacttcagccgtaaccgcacgttcggttcgatgataggcaagggatattccgttaaaagtgcgcagattgaaatggaaatgatcgcggaaggatactacggcacgaagtgcatcaaagagatcaacaagcatcaccacgtcaacatgccgatactggatgccgtatacaatatcttgtatgaacgcatctcacccatgatagagatcaaattgctgactgattcttttagatgagaaaaataaataataggtaataggtaataagtattaggtattaaccgtagccacctaagctttgcgtctcatgcataatacttaatacttattacttaatacctattacttattacctattacatattacttaaaattgatagatatgattagcttgaacattgaaaaaacatttggattcatctccaaagaaaaggtttctgcttatgaagccgaggtaaaagctgcacaggaaatgctggaaaaaggaacaggagaaggtaacgacttcctgggatggttacatctgccttcgtccatcagcaaagagcatctggctgacctgaacgctactgcaaaagtattaagagacaactgcgaagtagtgatcgtagcaggtatcggtggcagctatctgggcgcacgtgccgtaatcgaagcgctgtctaacagtttcacatggttgcaggacaagaaaactgctcctgtcatgatctatgctggacataacatcagcgaagactatctgtatgaactgaccgaatatctgaaagacaagaaattcggcgttatcaatatctccaaatcgggaacgactaccgaaaccgctcttgctttccgtctgctgaaaaagcaatgtgaagaccaacgcggcaaagaaaccgccaagaaagtcatcgttgccgtgacagacgccaagaaaggtgctgcacgtgtgactgccgacaaagaaggatacaagacatttatcattccggacaacgtaggcggacgtttctctgtgctcactccggttggtttgctgccgatcgcagttgccggattcgacatcgacaaactggttgccggtgctgccgatatggaaaaggcatgcggttctgacgtttcgtttgcagaaaaccctgcggctatctacgctgctacccgcaacgaactgtacagacaaggcaagaagattgaaatccttgtcaacttctgcccgaaactgcactacgtaagtgaatggtggaaacagctttacggagaatccgaaggtaaagacaacaagggtattttccccgcatctgttgacttttctaccgacctgcactctatgggacaatggattcaggaaggcgaacgctcgatcttcgaaactgtgatctcactggataaagtagaccataaactggaagttcctttcgatgaagctaatctggacggcctgaacttccttgccggcaaacgggtggacgaagtgaacaaaatggccgaactgggaactcagctggctcacgtagacggcggtgtacccaacatgcgcatcgttcttccggaactgagcgaatacaacatcggcggtctgctgtacttcttcgaaaaagcttgcggcatcagcggctatctgttgggcgtgaatcctttcaaccaaccgggcgtggaagcatacaagaaaaatatgtttgctttgctgaacaaaccgggatacgaagaagaatcaaaggctattcaggctaaactgtaatatccaataactgacaataaaaagaagcggcctctccggagaccgcttctttttattatatttccttcgttacgttaaagtaactcattccctttcaggattcattctcaacgacttctgttttcaagtcaatcacttcctgcgctccttcacactccgcctttgaagagagataaaaagataattgtacatcaccatttttatctacatgctcaacagtggcatgaaccagcaccttagtctttgtcacgccatctttgaagcgcaactgccctttttcttcgtctgtcagatttccttcggtagtgacttccgtcttttcataacggagctcagtcttcatctcttcaccattctgaagctggaaagatttcagttcggctccattgccgtccaagaccaaaaacgcatcgaccttatctcccactttcaaagcaggcatttcactcatccggtttgcatagtcttcgcggatggtttctccatcgccttgatctactttcacatatagcttttctatcgtgataacagggctttctccgctatccgaacaagcacccagaaacaatggcagcagaaacaatactttctttttcatgctattgactagttttatcatgctacaaaaatacatattatcttctaaacgacaaattatcatacgatttatcatccaaaacacaaccagcaactatctcctccattctgttatatctctcattttttatgactatctttgcttcgtatatctctttttatcccaagaataaatgaattctaaataaaagaacaatggaaaaattagtaagaagaccgaatgcagtgatattgtttatcagcttgtcactactgatgatgttaaccaccggttgtcaggaaatcaaactcaaagcaggcattgaggctgccaacaaacaatgtccgatagacatgggagagaccggaaaaatcaccagcatcgtctatgatggagagaacgtagtgtataccttttatctgaacgaagaggctgccaacatcaagactctgcagaaaaatccggaaagcatgaagacttccctgaaaatcatgttccagaatccgaataaagaagtaaagtcattgctggaccttgttgtaaaatgtaaagcgggcctgcaaatgatatatataggtaaagattcgggagagcaggtagtctgcgaactgacaacagatgaaattaaggaaattctcaataaggatgtcgacaccaccgaaagcgacctggctaaactggaaacgcaggtacagatggcaaacttacagttcccgatacaggcaagtgaggacgttctgatcgagaaaatcgaactcagcgatgaagcagtgatttatatctgtcgtgttgacgaagatctgtgtgatatgaaccagattaaagcaaatgccgcagaggtgaaacaaggtattatcgaaacattaggcaatcagaccgatcttgctacccaactgtttatcaaaagttgtgtgaattgtgacagaaatatagtctacagatatatcggcaaacaatcggaagctcagcatgatgtagtgatcaccgtgcctgaactgaaagatatgctgaaaaaagaataaatatcaaacagattccatctaacccaattatgagaaagaaactgaaagccgtcctgttcgatatggacggcgtgctctttaactccatgccctatcactccgaagcatggcatcaagtcatgaaaactcacggccttgatctgagccgggaagaagcatatatgcacgaaggacgcacgggggcatcgactatcaatatcgtatttcaacgtgaattaggaaaagaggccacacaagaggaaatagaaagtatatatcacgaaaaaagtatcctgttcaattcttatccggaagcagaacgtatgcccggcgcatgggaacttttgcagaaagtaaagagtgaagggctgactcctatggtagtcactggttcgggacagctttctttgttggaacgtctggaacacaattttccgggaatgtttcataaagagctaatggtgaccgcttttgacgtgaaatatggcaaacctaatccagaaccttatctgatggctcttaagaaaggaggcttgaaagcggatgaagctgttgtgattgaaaacgcacctttgggcgtggaagcaggacataaagccggaattttcacaatcgcggtcaatactggtccgttggacggacaggtgttgctggatgccggagccgatctgctgtttccttctatgcagacactctgcgatagctgggatacaatcatgttataaacctataaataccgattctactatgcaaaagttattatccttacctcccaacttaattgacagttttcatcaactggaagaagtgaatcatactgactggttttgtacatcagaccctgtaggcagcaagttaggctccggaggaggaacgacctggctgttgcaggcctgccatcaggcttttgcaccggaagagactttcagcaaatggattggaaacgaaaaaaagattttgctgcatgcgggaggacaaagccgccgcttgcccggctatgctccttcgggcaaaatactgactcccataccggttttcagttgggagagaggacaaaagctgggacagaatctgctgtcgctgcaacttccgctatacgaaagaatcatgaagcaggctccgaaaggcttgaacacgctgatagccagcggagacgtatatatccgttcggaaaaaccgctgcaagacatcccggaagtagatgtcgtatgttatggtttatgggtgaatccttcattggctactcaccacggagtattcgtatcggaccgcaagaagccggaagtgctcgacttcatgttgcagaaaccttctttagaggaattggaaggattatcgaagacccatcttttcctgatggatatcggtatatggatattaagtgaccgtgccgttgaggtattgatgaaacggtcattgaaagaaggcacgaatgatatcagctactacgatttatattcggattatggcctggcactgggagagcatccccaaacgacagacgatgaagtaaacaaactttcggtagcaatcctgcctttacccggcggagagttttatcatttcggaacgagtcgggaactgatttcttccacactcgccatacaggataaagtgcgtgaccaaaggcgtatcatgcaccggaaagtaaaaccgaatcctgccatctttatacaaaactcgtttacccaagtgaagttatctgcagagaacgccaatttatggattgagaacagccacgtaggagaaggatggaaattaggttcacgacagattattacaggagttcccgaaaaccattggaatataaacctgccggacggagtctgcatcgacatcgttcctatgggagacgcagcctttgtcgcacggccttatgggctggatgatgttttcaaaggtgatttaagtaatgactcgaccacctacttggggaactctttcacacagtggatgaaggaaagagagattggactggaagacataaaaggacgtacagatgatctgcaagctgctcctgttttccccgtaacgacttccatcgaagaactgggtattttaatacgctggatgacagctgagccacaactaaaagaaggaaaagagctatggctgagagcagaaaaactatccgctgacgagatatcggcacaagcgaacctggaacgtctttacgcacagcgcagcgctttccgcagggataactggaaaggattgtccgccaattatgagaagagtgtattctatcagcttgacttgcaagacgcagccaatgaatttgtccggctcaatctggatgttcccgctgtcttgaaagaggatgccgcacccatggtgcgtatacataaccgtatgcttcgggcacgtatcctgaagctgcaaggcaatgaaggctgcaaaggagaagaacaagctgcgttccagctactccgtgacggattactggaagccgttgccggaaaaaagaactatccgaagctcaatgtttattcggatcagatcgtatggggacgtagtccggtgcgcattgacgttgcaggaggatggacagatacacctccttactctctctattcgagaggaagtgtagtcaatctggcgattgagttgaatgggcagccgccgttacaagtatacgtcaaaccatgtcacgagttccatatcgtacttcgttccattgatatgggagctgtggaggttatccgaagttatgaggaattgcaggattacaagaaagtcggttcgcctttctccataccgaaggcagcacttaccttggcaggatttgccccattatttgcggcggaatctcatgcgtcattggaagaacatctaaaagcgttcggttcaggactggaaatcactttactggctgccattccggcaggttcgggactaggtaccagttctatccttgcatctaccgtactcggagctatcaatgatttttgcggactggcatgggataggaacgacatctgcaattatacactggtattggaacaattacttaccaccggcggcggatggcaggatcaatacggcggcgtattccccggcgtaaaactgttgcaatccgaatccggcttcgaacaacatccattagtacggtggttacccgaccagctctttgtgcagccggaatatcgggattgccatctgctttattataccggaatcacccgtacagccaaaggcatcttagctgaaattgtcagttccatgttccttaactccggaaagcatcttagtttattagcagagatgaaagcccatgcgatggatatgagcgaagctatcctgcgaggtaatttcgaaactttcggcaatcttgtcggcaaaagctggatacaaaaccaagcattggacagtggcacgaatccaccggcagtagcagctattatcgaacagattaaagattatacgctaggatataaattgcccggtgcaggaggtggcggttacttatatatggtggctaaagatccgcaagcggccggatgcatccgtcggatattgaccgaacaggctcctaatccgcgtgcacgctttgttgaaatgacgctttccgataaaggattacaggtatcgagaagctaagaaaaaagttatataagaacaaaaatcccttgataaccactgattatcaagggatttttatgtgaccccggtgcgattcaaacgcacgaccttcagaaccggaatctgacgctctattcactaagctacggggccatttcctaaatgcgatgacaaaagtataaaaaatcttctcatcttcctaatgattcatctttttttatagttcttaagtcagtatcgccccttaacattctgttattttgaaatgctttagagcatatactttatcaatttgacaatcttttagagattatccaatacagatatcaatattattcctatctttgccgacaattaacaatcaacaatcctatgagttacttgataaaaccaaagaactataaaccgttactcgacttaaaacaaacagagttgggaatcaaacaaataaaagagttcttccagttaaacttgtcatccgaattacgcctcagacgcgtgacagcccctcttttcgtattgaaagggatgggtatcaatgacgatttgaatggtatagaacgtcccgtttcattccctatcaaggatttaggtgacgcacaagcagaagtcgttcattcattagccaaatggaaaagattaactctcgccgattacaatatcgaaccgggatacggtatctataccgacatgaacgccatccgttctgatgaagaactcggaaacctccattcgctctatgtagaccaatgggactgggaacgtgtcatcaccaacgaggacagaaacgtagaattcctgaaagagatcgtaaatcgtatctacgctgccatgatccgtacagaatacatggtatatgaaatgtatccgcagatcaaaccttgtctgccccagaaattacattttatccattcggaagaactacgccaactctatccgaacctggaacccaaatgccgcgagcatgccatctgccaaaaatacggtgccgtatttatcatcggtatcggttgcaagctaggcgacggcaaaaaacatgacggacgtgcaccggactatgatgactacacatccaccggcctgaacaacctgcccggactgaacggtgaccttttactttgggatgatgtactgcaacgctccatcgaactatcctctatgggtgttcgtgtagacagagaagcgctacaacgccagctcaaagaagaaaacgaagaagagagactgaaactttatttccacaaacgattaatggacgacacacttccactatctatcggtggcggtatcggtcaatcccgtttgtgtatgttctaccttcgcaaagctcatatcggagaaatacaagccagcatctggccggaagatatgcgcaaagaatgtgaggaacttgatatacaccttatataattgctatgaacgtacaaatagaagaaagctggaaaacacacttacagccggaatttgaaaaagattactttcgcacactgacggaattcgtaaaaagtgaatacagccagtatcagattttccctccgggaaaacttattttcaacgccttcaacctctgtcctttcgacaaggtgaaggtagtaatcatcggacaagacccgtaccacggaccgggccaggcacacgggctctgtttctctgtaaacgacggagtacctttccctccttctttggtcaacatctttaaagaaataaaggcagacataggtacagacgctcctactaccggaaacctgactcgctgggctgagcaaggagtattattgctcaacgccactctgactgtacgcgctcatcaggcaggctctcatcagaatcgtggatgggaagcttttacagatgccgctatccgcgcactggcagaagaacgggaacatcttgtatttatcctgtggggagcttatgctcaacgaaaaggagctttcatcgaccgcaacaagcatctggtacttagctctgcccatccctctcccctttctgcctacaatggtttcttcggaaacaaacacttcagccgtgcaaacgattatctgaaagcaaacggagaaacggaaataatatggtaagaagttgagaattgaaaatggaaagttgagagtcggctgcacaataaatgatgacgctgcatagtaactctcaactctccattcatcttattattgctagatattgttatatatctgtctacacttttctattcttaaatatccgcattagcttaccttacacaacactaagtctatttaatcttaaaaaaatatttctcatacataaagctagccaatagatcaatcctataaaacaagattaaatccaaacaccatataatattatcagtatttatttcactactacaaaatatacaatgaactattgttcataaattctatagaattgaaaatcattaatttaagttcagttctttttccataaataattctacctttgctttgtactcatgagacaaaaaattatcaacctttaaaccaaaagtaaaatgaaacgaacaaatttatttttcggtttggcatttgcattattctgctcattgccaatgtatgcacaaacagtatctgaagatgtagatatcaacactacatcagaatctgcaactcccagatttgtcaacatgttcattaatgataatggtgccatttatcccatttacgtacccaatttatctgaaaacacaaagattcaggaagtttggaatgaagcctctgctatcttgggcacaaggtattttgatctttactataatggtcaaaagttgagcttagacaagagtttcgctgattattggatcacaggtaatatttctgtttaccttgaagttagaaggcgttaagttaacaattacttttcttacagagagagtgtgttgtccggagcacactcttttaaacaaatactttttcttagtctatttctctctcttgcctaaataaattatatatactatattgatcaaacacatgcattttcatttcttcatcgccaaaatctgtatttaatagacttttatctatttcgtatctgaattcaaatcacaaaatacaaaattaagtgattatatataaatgataaatatattcttagataaatattcatcattcataaacttaagttcatcaacacctctatatttgcattttttattactaatacatattaaacgcatagcattttccattacatttataacaaaaagcctaccataactcataataaaacgaataatatgcatagtaaaaatgatttcaacattgaaaattacataaaagctctatccacatacataccagcgtcctccatggtcaaactaaaaaaagcatataaagccttcacttttacaaaacaccctaaatcaactattcttgaaaacagacaactgaatgattcattttgcatccttatatgtgggaccataagacattacacaatagatagtaacacagcagaagaacaaacattacgattcaccctctcaggcaatttactgtgtcaatatggaaccgctacagaagcaacagaatatttaagctgcctatctgaatgtaccattttatctgtctcaaatacaattttagcagagataggagaagaaacaaatttgagaatatactgtcaaaatattataaaagaaaacttagagttagaagtggctctattaagaatgccaccagaaaagcgatatataaaactatgcaaacaatatcaaaacatatttctgacggtcccattaaaatacattgcgtcatttttaggaatcactccccaagctttatgcagaattagaaagcgtttactaataacaccctaataccactgaatattactttgcgtctgacttctctgctcatatttcaagtcttgaagaatacttgcattagcacgaatcgtaacattatagtatttccaacgtccaaatggtgaaagactggcagacaagttaaagcagtgcaaatcacgagaaatcgtacaggaagtctgcgttatttccttcgcttggaaatcgtaacccgaattgaacgaaagcgaccagttattggaaatcttcacattaccattcatattgatattgtgagtataagtaaacggatatctcatcgaatagcgattaataggcttagtcctatcttcacgaatattaaatgaataactgaaacttaaagaccaaggcatcttgaatacttgataaccatccgggtcggcttgcgccttctctactttcttggtcgtagttccatcttccgtaccttcagaatcttctccgtctccatcttctgactccttcttgtctttatccttctcgtcttccttcggaccgaaccactttttccaggtatcgttattaaaggtatagttaaaagaagaaccatacccctgaaaacgtccgaaacgtccatacgaccattcagttcgattaccttcgaccacattaccacttttatcaaacgtataagcgtaagtagcaaatgatgcattcatattgaaagtataattctttgtcagtttcagtcgaagattcatactcaaggggctccatggcttttcctttgcagccatattatatgacatattcacactcaaatcatcaatcaagctgactttctttaatgtatccttcttagcatcataatatttcatctccagattattagcaatcgagaaactaaccgttcccgaaccctcacgtgaagggactccaaaaggctgtcccgtatagggtgaataatactgagtatttccgttattatccgtatactcttcccagtatttactaaatgcaggagcaccactgataccaacctgcggagtgacaacgtggcgaatctgtatctctttcttcttcatgaaaagaggtttgtacataccatacagtttagtacttaaagacaaactggctgaatagttggaaacacgataaaagccattaatagtatcattcagattctgttccaaacgccctgtttcctcattatacgtctgatttatcttgcgggtgtaccaacgctccgtataattcaccgaaggattgacctgcaaatacttgaacagtgtaaaagtagcactgacaggaatattatggttcatcgcattttcccatccgctgatgccggtcttgaacagacggtcgtctttagtacggatactgttcgtcagacgtcctgtatagctgacagaaatcttctcataccaacgctcggctccggcagccttcttccgcttgaagggaaacagacggctcaatgtaatattaaggtcaggaagcgttactgcaatggatgagtcacgcatggtctgcgcaatattggtcgttccagacaaggtcagaccgatatcggggaaactacgggagtaactgatacttgatgtctttgtattctgagtcaacaactgggagttataaaggttgttgatgttagatcgttcgtaactactggtagagaagttcacactggcggagaaagtactgttcggacttgccttggcatcctgacggtggttccacactaccttgaagtctttggcaaccgtataatccggcattcctttgtctccggtcttggtcacctgataatccgcctgcaatgtaccggagtatttgtacctcttattataattggtcaatccggaaagccgccatgaacctttcgtgaatatatctcctgtcagcttcaagtccatgatgtcactcatagcaaagtaatatccgccttccgccagaccgaaaccacggcttgaatcatccatatacgtcggcataatgaaacccgaagaatagctgctggagaaagggaagaagaaaaacggcacagccagcggcaggggaacatcttccaccacaagataggcaggtcctgtcactacattcttcttggggcgcactttggctcttgtcaactgcatatagaagtgaggatggtcatgatgatcacaagtcgtgtagcgaccgtgctccataaagatttcatcatttgctcctttcttggctctgctaccggtcacataaccttcaccctgttgagtgataatatcggtgattcccgcttttttgctcttgaagttatagctgattgtttctgtatcgtatgcagtttcaccttctttaaagacaggtttacctttgatcgttcccgttgtgtctttaataccgtaggcgtgtactgtactactgtccagattcatggaaatcacttccgctgccagctcaatgttctggtagttgactttgccgctaccataaagtgtagcggcacctcccaatgtaaaagtggtggagtcgttagattcataaataaccggtgcatcgagcggttgtttctttgtcggtgctacagagtcgacgcgtaccacaactgtatccgcccctaacgaatctttcctgttaagggaatccgtttgtgcagtgttggaggcaatcatccctcttcttcgacgctgagacgtagcctcatcaggaagcatcagcaagacaatcagcaatatgaatgatataattatttttgctctcaatggcgccattaactaatagttttacgcttgaagtggcaaaagtacacaatcttcatcaataatgcgtgagaatccccgttatttaattattttttagtgctataaaaacaaagagcaccacccatcaaagcggtttagaccttcttcaccatattttgcaatgcttttccgggctttttctactgtcttttcttcgtcaagatgagttttagaaaagaatttatcggcaaaacagattatttgctcttccagagtgacgggcaccatctcacgatgaggaacaggaagctggcgttctatgatttcttccagtgtcagtccggctccggtgtgacgttcgcaaaccagtgcatggcgttcaaaaccttcttttcgcaaaaggtctgcacccagataaccgtgtgcgatgtagggatgctctccgaaacattggatggtgggagcatcggtcataaagattcctatatcgtgcagaagcgcggcttctctgacaaagctgcggttgataggtaagttaggatgtgcatctacaatcttcaaagctttttgggctacagaaaggctatgtattagtagaatgtgtcgttgttccgtatcctgcggataaaatttgtcgatgatttctattggattcatactttttcactagttattacttgttcccttactgataaatgatatttttgtgcaatattacaaaaatttactgatatgcaagccagaagttccctcattcttttctctctgttcataatactgtgttctacatacgccagtggaaaagtaattacgggtgccgagcgtatggatcaatacctgccgttaatcaaaggaaagcgggtaggaatggtggtaaaccacacttccatcgtcggcacagagccaattcatctgctggatactttattaaaacaaaaaatcgatatagtgaaagtctttgcaccggaacacggtttccgcggcaacgcggatgccggtgaaacagtaaaagacggaaaagacagccgtacgggagtaaccatcgtctcgctctacggagataataaaaaaccgactgccgcccaactgaaagatatcgatgtaatcttgttcgacatccaggatgtgggcgcacgtttctatacatatatcagtacgatgtattatgtaatggaagcttgtgcggaaaacaaaaaagagatgattatactggaccgccccaatccatgcgattacgtagagggacctgtattaaaagccggatataaaagttttgtcggaatgctgcctttgccggttcttcacggttgtactatcggagagctggcgcagatgatcaatggagaaggatggatgactacccaggcaaagacttgtccgctgactgtgattcccgtaaaagggtggaaacacggacagccctatgtacttcccgtgaaaccatctcccaacttgcccaatgcacaatccatccgcctttatgcctcactttgcccttttgaagcaacacgtgtcagtgtgggacgcggaacgacctttccttttcaggtgttaggcgcacctaacaaaaagtatggcgattttgccttcactccgcgttccttgccgggattcgacaaaaatccgatgcacaaaggagtcacttgttatggcgaagatttacggaacgtaacagacgtaaacggtttcacgctccgttactttctgcgtttctaccgtttatccggcgaaggcgcagcattcttctcccgtccccgatggtttgacttactgatgggaacggattcagtacgcaaagcgatccttaaaggagaatcggaagaggaaatccgtgacagctggcaaaaggagttgcagacctaccgtgatatgagacagaagtatttactttattaaggaacggttcctccacttctcagcattccgttcgaactcttcggctttctttccactcaaccttgcaggcatttcaagtatctccggaatgtcttttgcattgtcaatgatttgagtgccggaagcgttcttcacaatacggacatcatcgtacagtgagtcattctccagataagcctgcatccggagcgtgtctcccgtcacgtcgatatgctggtagaaacggcggttcgtcccgaaacgatcatacttatcattgaaagacaaacggtaactcttcggggaagcgtggcttaccagatacaacggggtggtcatttcgccctcatcgttcttattagtcatacgggcatagttatgctcatgtccctgaagcaccaagtctactccatattcacggaacagtccgtcgaacatccagcgcacggcaaggttgttcgtcttaccctttatagaatataccggatgatggagcatgacgatcttccatttctttttcgaagccttcagcgttttctccagccattcccgttgagagaagaggaaccaaggatcacggttactatccagcgtgatgatagtggcatcgttgtaatcaatagaatatacattattatttttatacctcgattcgagcagataagaaaagacataagcaaatcgtttctccaaaacacgtaccagtccttttacatattcatgatttcccggagaaaccaatatcggtttggtgggagctatggaatccacactctgataggcttcatcccagtaacagttcatcggacgctctgcaaagtcaccggcaaacatatagaagtccgcctgcggatagcgatggcgcacattttccataaagccacgtgtctttccacgcaaagtatcctgcacgtcacctataaatacaaaagagaaatgatcagtcgaatcgggttgcatcgtgaacgaataccaatcggatgagcgatcgtcattccatacccgataagagtaggaatcgccataagagagttctttaaactttgcccagttggcataaccgaacccgcccagcgtacgaagaaatttggaagagccgtcaacgagaagagtatctccggaaccgatctttgtatattccagctttgcctgcttggaaacgcctccgcacacccagctcacattacgggacagttcgccgtcatttccgaatgtcagaaatacccgttgcgggtcttccgtcagcacatagcgtatttcagggatattgtggaaccagactttccagcgtatcttacaaatgacaccaccggcaatcaatatcaggagaacgatgccccaagctattttcttcttcgtaatcttcatttttccgattttaaaaactggtagcaaagataaatatagtgtcccataaatcggaaattatgtccttttttaacctttaacaaattcacctctacatgagaatttaaatatctaaaattgctgtcatctgtcaccaaaagctaaataacacactgattataagctaataaagaggtgacagcagggcgtgacagcattgtgacagcacattttgttgtcacaatgccgtcacgctttgctgtcatatcctgctactatcatatattgctccttggaatgataaatcaaagaatagcttagtctagttggtttccatgcgatgaaactatagttccaagctgaagaaaccaaagtttcaagcagaggaaactccagtttcaagacgatgaaactaaagtttcatcaagcaaaaaacaatttctacaataggaaactatcagcagtaaggtagcttctgatgtgtactggttttagttgacaacttcgtttgttataactgaattagtttactcaatatactttaatatctaaataggtttacttttgttattcttattcctatgttagttgtcttttgttggtgcttgcaaatttatgcatcttcctttatttacgcaagccttcttcaggaaaatgtaatgttgccaacaaccaaaaactcttcggtcggggatcgccctagcggcaaggggcgggaccacccgtcccgacgagcgggtattatgctgttaatcctcccgtttcgctgaccacttccataggtgtcctcatgtttatcccttgatgaggccgcacatgattatatacatatacagcatcttcaatgcgcttgcttacttgctcgaagctctcatcatcacagtcgaatagccaaccgtttttaatggtgttgttcattctttcagccaatgcattatgtaaaggatcaccacactgcgtcatactgatgttgatttgatgctctttaagcctctctacatatttatttgagcaatattggacaccccggtcggaatgatgaataagagtgctcatgtctatgtgatacttctcatagaatgatattgccatctccaaagctttcaagggcccctccgtctcaagagttttgtaaagcgcatatcccacgatggcacgacttgacgcatcggtaagcaacgagaggtaagcccagccctgaccggtgtttacgtaggttatatccgccactaccatagcgcccaatcttgtagcgacaaatttgggtgcaacattcaacagatcggggtagatatagtaattatggttcgaattcgttgttttaggacgcttgcgacttgtacgttgacacaaaccattggagcgaaaaatgtcatagcaacgatcacgaccgataaccatctttggtccaaacttactcacgcagcaggcgtataactcgcgcataccagctttgggcatgagttccaacagttctttgcagtacaacacgatgcttgtggtaaggatatcaacctccaaatgtcggttcacatgcttgtaataaccttgtcgggttatgccgaagtaatcacagaggaactttatacaaccacgtttgcgtcggggtgagtgcctctgtgacaaggtgtcgattacttggcatcggagttttttcgtaccttgatatgatacgtggattcagcaagattgatgagttcttcgcacgcctcgtgacgtaaactctcatcagcaagagcccgatgaagtttacggttctcagcacgcaatagcgatagttctttctggagctcagaaatactagaatcaatagcatcgctatttactggtttagaggatctacccatatctttgtcttctatttgatacttgttaagccaataagtaagaagcttggcacaaaagccgttacgcttacaaaactcagatttgctctcgggacttgataaatactcacgaatataagacattcgttcatcatcactgtaatagttgtactgctttttcgaatatttcatctttattttcgatttttgaagtgtcaacttattcagtacactacattcagtctcttgtttttctcttcttccacaattgccagctattaataatattttgccacatattaacacatcaccatacaaatctgattatcagcaaataaatccacctattactaatagcaggtaacaaaaaaacgaagaaaatcgcttagtggtgggcttcgtgtacaaaggcaacaaagggaaattacctgccaaaaaagagataggctttcgctctacaataactttctcagttcctcaatgtcaggcaaggcgttacgaagtcgttccggcatatctttggatgtacggtaagtagcgactcccatcggcttgttataatcacgaactgcaaattctacaaaagtttgattcatttctctgcaaagtattattccgatagagggattctcgtgcggttttctcacatatgaatccaaagcggaaagataagtattcagttgtcctaaatacgaactgcggaatttcccggacttcaattcaaccgccactaaagaattaagttcccgattgaaaaacaacaaatcaatgaacatttcctctccagccacttcaacacgatattgattgcctataaaactgaaatcctgcccaaaagtcataataaacttcttcacgttggcaacaatcgacttttctactatcttttcgtctaaatcctcttcctgctcatccagttcctccacattgatgaaatcaagcaagtattcatctttgaatgaacaaacagcttttagcgcttgcttagtatcaggcaatgtttgtgcgaaattgttaggcaaagttccccggtggctgtacaggtctgcttttaagtaatcccttaaagtgtatttactccaatagcgaatagcgcactcatgtatataaaatagccttgcttccaaagtcttagctttggatattatttcgatatgatgactaaagccgattgaaaagaagtctgaccagttaaattcatcagccagtggctggcgaattacgctcaacagcaatttttcatctaataccaaatcgccagccagtggctggcgatttagaacaggttcccattcttcatagaaaactcgcatattctttatattcgaagttgaaaatccccttagtcccggcaattctttttgcaacagagaagatatttgctctattgctcctttaccccaaaagcctatacgggaatttttcgacacgtaacgtccgatgccgtaataaagagatagctgttctttgttcaccgatgtggctgcacggtactggctgcgcagaatagcttcttttatggtctttaccgcttctctataattctgatttatatccatttgcgttttgttatatgcgacaaaagtacaaaaataatgctggcgaaaagaaaacaaaggtgtttttctcttttcgccagcatacatattttgctgttcatggaaggaacaatgctcctacagccgaatcatattctgttgaaccataatgatagctatctatacgctcctctatataagtaggaaaataggaaaaacaaaggaaaagagagatacaaacaacaaataactaaatatcaatatcttatattcactattttatctctttctttctctttctttctcttcttccacaactgccagctattgatgatgttttgccacaggacatacgaaccgggagcaacagacgataacgggttcagataagtatgcgccatccagatagcaagaatcgtattcttctgccccagtgcctgcccgccactgatgcggtcattatagaccgagccgatagtctttcccaaaaagaactgcaagcaacaggcaatcaaggcaccgaccgcaatcattatttccgtgaaaccatccgcaggatcgttcagtaacgaatacagggtctgagccgtcacaatagccaaagagaccgcccacaaataaaaggcgagttcatgatatcccagtaacttctgatgcactttcggcaggaatttactcaacagccatgctgcaaggaaagggcagatcaacaaggggaacaccttactcaaaataacccaaaatgctccccaaaaacttacatccggatttacctctatcaaagggaagagaataggcaccgcaatagcagcaccgatattacccaacaatgtataagtagtcagacttgccgcactccctcccaacttggaagtaatcaccgcagcagccgtagccgtaggacaaataatacataccatcaccccctccgctacaatcttattgaaacggtaaagcaataaataagcaaggaaagcacccccgatctgaatcagcaacaaccatgcgtgcaacggtttaggcttcaaatcatgcggtgataccttacagaaagtcaacagtaacatcgtaaagataagatagggagtcagaaaagaaaagtagataaatatcggataaccgacagcacctaccagcatcgcaataggcaacgtccaattcttcaaaaacttaagcatcgtcgtatattttttcttggaggtgcaaagtaacagagatttcgggagaaaagctaccattaaaccgaaaaaaacacaaaacttaagtgtaaatcatgagttttctgcaaaattctactacatttgcaccgtatttaaatatgaaaccgcatagaacctacatattatatatatcaatctgcctctggctacttgcttctcccctatgtatcggcgatttatgggggaaagatttcgtagtagtcatcgatgccggacatggcggtcacgaccccggtgccatcgggaaaatatccaaagagaaaaacatcaatctgaacgtcgcactgaaactgggaaacctgatcaaaaaaaactgcgatgacgtcaaagtgatctatacccgcagcagggatgtctttatccccctggaccgacgggcagaaatagccaataacgcaaaagccgatctctttatctccgtccacaccaacgctctggcaaaaaaccgcaccgccaaaggagcttctacatggacactgggtctggccaaatccgatgccaatctggaagtagccaaacgagagaactcggtaatcctctatgaaagcgactatcagaccagatacgccggcttcaacccgaactcggcggaatcctacattatcttcgaatttatgcaggataaatacatggaacaaagcgtacatctggcatcacttgtacagaagcaattccgccatacctgcaaacgggtagaccgcggagtgcatcaagccggattcctggtgctgaaagcaagcgccatgccaagtatcctggtagaattgggcttcatctcaactccggaagaagaacgctatctcaactcggaagccggagccaacacaatggccaaaggcatctaccacgcattcttaaactacaaaagagaacaggagatacgcctgaccggagccagcaaaacaattatcccaaccgaagaaccggcaacaagcgctccggaacaaagggaactgatggccgaagcaagtacaacacccgccaccgccacaaaaacagctcccaaacggcctattgtctcagaaagcgcaaccaatgacagcgaaataacgtttaagatacagatactcacctcctcaaagcctcttactaagaatgacaaacgactgaaaggactgaaggatgtggattattacaaagaaaaaggactgtacaaatatacgtatggcgcttccagtgattataataaagtgttacgcaccaagcgtaccatctcggcacaattcaaagacgcattcatcatcgccttccgaaacggcgaaaagatgaatgtcaacgaagcgatagccgaatttaaaaaaagaagaaataaatagaaaataaaatgaagtacattacaaaagaagttcgaataggaattgcaggtatcgtagcattatgcgtgcttgtctatggaattaattggctgaaaggcatacatatgtttcagccttcaagctatttctatgccaagtttcagaatgtaaacggactgaccaagtcgagccctgtttttgctgatggcgttcgtgtaggtattgtacgcgacatcgaatatgactatgtaaatcccggaaatgtgatcgttgaagtcgaactggacaccgaactccgcatcccgaaaggaagtagcgcagaacttgtatccgaactgatgggaggcgtacgcatgaatattcttctcgccaacaacccgcgtgagaaatatgccataggcgacaccatccccggcacattgaacaacggaatgatggaaagcgtagcgaaactcatgccccaaattgagagtatgttaccgaaactggattccatcctcacctcactgaacaacatcgtaggtgacaagagcatcccttctacgctgcgctctatcgaaacgactaccgccaatcttgctgtagtcagctctcagatgaaaggactcatgagcaaggacatcccccagctgaccggcaagctcaataccatcggagataattttgtagcgatcagcggtaacttgaaggaagtggactacagcgccattttccaaaaagttgacgcaacactcgctaacgtaaaaatgattacagagaagttgaacagcaaagataacactatcggactgctcttcaacgaccctgctttatataacaatctgaacgctaccacagagaatgcggcgagcttactggaagacctgaaagcacaccccaaacggtacgttcatttctctttattcgggaagaaagacaagtagcaaatctttcttatatagattttatctaaataagcaggcggtatataaaagggagtataacctctgcaaaagtctatctacagaccgaaataatattcccgtacaaacaagtacgggaagtataaaagagtaagaataaaacgataaacaactaaaatacagatacttataattttgcaagagaggggaaacagacagtgttccaacacaattctataagtcattgaaagtaaacacattattgtttgcccgagaaaaacaagaaaaagctaatttgttttttccaaataagattcccaattttgcaaacgtagaagtttcgcttaatttaataaatgtattaaagtcactatgattgaatcaaatcatgttgtactttggaaccgctgtctcgaagtaattaaagacaatgttccagagacgacatataatacttggtttgccccgattgttccattaaaatatgaggacaaaacattgatcgtacagatcccgagccagtttttctatgaaatactggaagagaaattcgtggatttgctgcgaaagacattgtacaaagctattggcgaaggcaccaagttaatgtataacgtcatggtcgacaagacttcgattccgaatcaaaccgtgaatctcgaagcaagcaatcgttctacagctgttactcctaaaagcatcgtcggtggcaacaaggcgcccagtttcctgaaagctcctgccgtacaggacttagacccgcacttgaacccgaactataacttcgagaactttatagaaggatacagcaacaaactttcaagaagcgtagcagaagcggttgcgcaaaatccagcaggtactgccttcaatccattgttcctttacggagcgtccggagtggggaaaacacacctggcaaacgcaatcggtactaaaatcaaagaattatatgccgataaaagagtattgtatgtttcggcacatctgtttcaagtgcaatatacagactccgtacgtaataacacgaccaacgactttatcaacttctaccagacaattgatgtattaatcattgatgatattcaggaatttgccggagtaacgaaaactcaaaatactttcttccatatcttcaatcatttacatcaaaacggaaagcagcttatactgacttccgaccgtgcccctgtattattgcagggtatggaagaacgtctgttgacccgtttcaaatggggaatggtggcagaactggaaaaaccgactgtcgaactccgcaaaaacatcctgcggaacaagatacaccgcgacggtctgcaattcccaccggaagtgatcgactatatcgctgaaaatgtaaatgagagtgtacgagacctggaaggtatcgtcatcgccattatggcacgctctactattttcaacaaagaaatagacttggatttagcccaacatattgtacacggcgtagttcacaacgaaacaaaagcagttaccattgacgatatactgaaagtagtatgcaagcactttgatctggaagcatcggctattcacaccaaatccagaaaaagagaagtggttcaggcacgtcagattgcaatgtacctggctaagaattatacggatttctcaacttcaaaaatcggtaagttcatcggcaataaggatcatgcgacagtgctgcatgcttgcaagactgtaaaaggtcagttggaagtagataaaagctttcaggctgaggtacaggagattgagtcgttgctgaagaagaaagcataattcaagtaataggtattaagtaataggtaatatcgaagctgcataaacaagtgcagtccgcatagctattacctattacttattacctattacttatcattagaatccttgttgacgaagcactttcaacaagttctcagacataaattcattgtctttctttgtataacgtacatccgtaaatacttgtgccagagtttctttcttattttcttctataaactgtttattttccggcagtgattctttatactcgtacaagcgatcgatgtcttccggagtataatcatggtaaacttcctgatgcacggcagcttcgagaggcaagcggtccacctgggccggagtaccgtccggatagccgactgtgatcgtcgtaatagggaataccagtttcggcagttgaagtgtatcgatgatcatttgcggattataagtagtcgttcccagataacagatacccaagcctgcctcttcagctaacgtgcagaaggtttgcgcaaccaacaaggtatccatagacgcattcataaaagacattaaattatcgtagccgggaacagcgtttctctgttcacaccacttgctgaaacggcggaaatcggcacaaaaagtaagcacgacaggtgccccttttaccatcggctgattgaaatgagcaggagaaagtttctctttcatttctgcatcgcgagtcactataacactataaagttgcatccctcccatcgtagaagcgcggaaagaggtttcgagcaaatcatttaacaaatcaggagtaatatctttttgctggtatttccggattgttcttctgttctttacggtttcaaacatatcttttttttgcaaagatacaaaaagaaatattattttgccatatcaatgaaataatctaattttctttttggaaaacttaaagccatgaacaaaaagcaaagttatctgttaatcaaagacttaacaataacaaacggaaaacttaaagcctgttgataaaatgttgcatttttattttgatagataaaaaaacattcttagctttgcagccacatttgttactgataagtaaacttctacacattacttattaaataataaaatctaagacacattggatcgtggaaaaacaaatttattcttatgacgaagcctacgaagaatctttacgatattttcaaggcgacgagcttgctgcaagggtttgggtaaacaagtacgcagtaaaggattctttcggaaacatctatgaaaaatctccggaagatatgcattggagaattgccaatgaagtagcacgtatcgaggcaaagtatccgaatgcactgacagcaaaggaactgtatgatctgctggatcattttaagtacatcgttccgcaaggaagcccgatgacgggtatcggtaatgactatcaggtcgcttcactatccaactgcttcgtaatcggggtagacggcgcagcagactcttatggcgctatcatcaaaatcgacgaggaacaagtacagctcatgaaaaggcgtggaggagtaggtcatgacttgtctcacatccgcccgaaaggttctcccgttaaaaattcggcattgacttccactggtctcgttccgttcatggaacgttattccaactctacccgcgaagtagctcaggacggtcgtcgtggtgcactgatgctgagtgtgtctatcaagcatccggattcggaagccttcatcgacgctaaaatgacggaaggaaaagttaccggagccaatgtttccgtaaagctggacgacgctttcatgcaggcggcagttgacgagaaaccttatatacaacaatatccgattgaatcggcaaatccgactaccactaaagaaatagatgcttccacattatggaagaagattgtgcacaatgcatggaaatcggcagaacccggtgttttattttgggatacgattatccgtgaatctgtgcccgattgctacgcagatttaggttataagactgtatctaccaatccatgcggtgaaattccattgtgtccttatgactcttgtcgtctgctggctatcaatctatattcttatgtagtaaatccgtttaaaccggatgcctattttgatttcgaactgttcaaaaaacacgttgcgctggctcaacgcatcatggacgacatcatcgacctcgaactggagaagatcgaacgtatcatggaaaagatcgatcaagacccggaaggcgaagaggtaaaacatgccgaacgcaacttgtggaacaagatatataagaaaagcggtcaaggtcgccgtacaggtgtgggaatcactgcggaaggcgatatgcttgctgctttaggtctgcgctacggaaccgaagaagcaaccgaattctctgaaaaagtacataagacagtggccctcggtgcctatcgttcttcggttgaaatggcaaaagaacgcggtgctttcgaaatatacagcaatgagcgtgaacagaacaatccgttcattcagcgtcttgccgaggctgatccggaactgtatgcagaaatgaagaaatatggccgtcgtaatattgcatgtctgacgattgctcctacaggaacaaccagtctgatgacacagacgacttccggtatcgaaccggtcttcctacccgtttacaagcgcagaagaaaagtaaacccgaacgatacgaatgtacacgttgactttgttgacgagacaggcgacgcattcgaagaatatatcgtattccatcataaattcgtgacatggatggaagctaacggatacgatcccgccaagcgttattcgcaggaagagattgacgagctggtggctaagtcaccttattataaagcgacttccaatgacgtagactggttgatgaaagtgaagatgcagggaagaatccaaaaatgggtagaccactctatcagcgtaaccatcaacctgccgaacgatgtagacgaggatcttgtcaaccgcctgtatgtagaagcatggaaatccggttgcaaaggatgtacggtataccgcgacggctcacgttccggagtattgatttcaaccaaatcggataagaaagaaactcttcctccttgcaaaccgcctacggtagtagaaacacgcccaagaatactggaagccgacgtggttcgtttccagaataacaaagagaaatgggtggcttttgtaggactgctggatggacatccttacgagatattcacaggtttgcaggatgacgatgaaggtatcctgttgccgaaaagcgtaaccagcggacgtattatcaagaatatagacgaggatggaaccaagcgttacgacttccagttcgaaaataaacgtggatacaagacgactatcgaaggattgtcagagaagttcaacaaggaatactggaactatgcgaagctgatctccggtgtactccgttaccggatgccgatcgagcaggttatcaagctggtaggttctctgcaactaaacagcgagagcatcaacacttggaagaacggtgtagaacgtgcattgaagaaatatattcaggacggaacggaagccaaaggaaaaaaatgcccgaattgcggtaatgaaactttggtctatcaggaaggctgtctgatctgtaccacttgcggtgcttccagatgcggttaacatgtgacgtatgttaattaatatataaacaaaagattaaaaggagccctaatacggctccttttattttttattcaaaaaaatgtcttatacttgcatagtcattagtgtctaatcaaaatctaatatatatgactgtatcatttaacatcgaatatcgtaccagttggggagaagaagtcaggattgccgggctgctgccggagtcgatccccatgcataccacagacggcatatactggacggcagacgtggaactggaagttcccaaagaaggaatgactatcaattacagctatcagatagaacaaaaccaaatcatcatccgcaaagaatgggacagttttccgagacgtctctttttatccggtaactctaaaaagaagtatcagattaaagactgctggaaaaatatccccgaacaattgtattactacagttcggccttcacggaagccttgttagcccaccccgacagagctgaaattccgccttgtcacaaaaaagggctggtcatcaaggcatacgccccacgcatcaacaaagactattgtctggcaatttgcggaaatcagaaagcattgggaaactgggacccggacaaagcgattcccatgagcgatgccaactttccggaatggcagatcgaactggatgcaagtaagctgaaattcccgctggaatacaaattcatcctttaccataaagaagaaaagaaagcggactgctgggaaaataaccccaaccgctatctcgccgacccggaactgaaaacaaatgagacgctggtcatctccgaccgatatgcctatttcgatattccggtatggaaaggggccggtatagccatccctgtcttttcactgaaatcagagaacagtttcggagtaggagatttcggagatttgaaacgcatgattgactgggctgtaagtacccaacaaaaggttatacagatattaccgatcaatgatacgaccatgactcatgcgtggaccgattcttatccatataatagtatctccatttatgctttccacccgatgtatgcagatataaagcagatgggaacactgaaagacaagtcagccgcagcgaagttcaacaaaaaacagaaagaactcaacggcctgccggcgatggattatgaagctgtcaaccaaacgaaatgggaatacttccgactgatcttcaagcaggaaggagaaaaagtattagcctccggagagttcggcgaattctttaatgccaacaaggaatggctgcaaccttacgctgttttcagctatctgcgcgatgcctttcagacacctaatttccgtgaatggcccagacattccgtttataatgcacaagatatagagaagatgtgccggccagaatctgtagattacccgcatatcgcactttattattatatccagtttcacctgcacctgcaattggtagccgctacgaaatacgcccgcgaacacggtgtcgtactcaaaggggatatccctatcggcatcagccgtaacagtgtggaagcatggaccgaaccttattacttcaatctcaacgggcaggcaggtgcccctcccgatgatttctccgtgaacggacaaaactggggattccccacgtacaactgggacgtcatggaaaaggatggctaccgctggtggatgaagcgtttccaaaaaatgtcagagtacttcgacgcttaccggattgaccacatccttggtttcttccgtatctgggaaatcccgatgcatgccgtacacggattactcggacagttcattccctccatccctatgagtcgggaggaaatcgaaagttacggtctcccctttcggaaagaatatctgattccatatattcatgaatccttcctcgggcaagtattcggtccgcataccgattatgtgaaacagacttttcttcttcctgccgaagcacccggtatttatcacatgaaaccggagtttgccacccaacgggaagtggagagtttctttgcaggaaaaaatgatgagaacagtctttggattcgagacggactatacacattgatcagtgatgttctttttgtaccggacacgaaagaaaaagataaatatcatccgcgcatcggaatacaacgcgatttcatcttccgttcactcaatgagctggagcagaatgcgtttaacaagttatatgaccagtattattatcaccgccacaacgatttctggcgccagcaggctatgaagaaactgccgcaactgacacaatctacacgtatgctggtttgcggagaagacctgggcatgattccggattgtgtttcgtccgtcatgaatgatcttcgcattctcagtctggagattcagcggatgccaaagaatccgatgtacgagttcggctatttaaatgaatatccatatcggtcggtttgtaccatctccactcatgatatgtctactttgcgaggctggtgggaagaggattacctgcagacacagcgttactacaacacgatgctgggacattacggaaccgcaccgacggtcgccactcccgatttgtgcgaagaagtggtgcgcaatcatctgaaaagcaattccatactttgtattctgtccctgcaagactggctgagcattgatggcaaatggagaaatccgaatgtacaggaagaacggattaatgtaccagccaatccgcgcaattattggcgttaccggatgcacctcactctggaacagttgatgaaagcagaagagctcaatgacaaaatacgtgagttaataaaatacaccggcagagctcccaagaaataaatatctttaggcacgggtgacacggattaacacgttttttagacctataatctcttaaaactgtaaatccgtgtcatctgtgcctgaataaaatcaactgatagttttgacacctccgtttctctcccatgcggcaattctttatcttccttcattccgttttttccaattaatcaagtatctttgcaacgcaaaaacgcaacgcaaaataaatgggagacaatcagcatcggcgtattgattttgtggacttaaccaagggagtctgcattattctggtagtgatggcgcatatcggaggcgctttcgaccaacttgacaagcattccatgctatcctgctttcgcatgcctctctatttctttatatcaggaattttcttcaagccttatgaaggattatacgggttcattatccgaaagaccaataagctaatcattccctttatcttcttctacgtcagcgcctttctactaaaatacattgtatggaagattgcaccggaaactttccatctccctgtgtcatggagagaattactgtttgtctttcacgggcacgacctcatcaagttcaatcctcccatctggtttctgcttgctctgttcaactgcaatatcctgttctatctgattcattatctgcgtgacaagcatttatctctgatgtttgcagcaacgttactgatcggatgcacaggattcttcctgggcaaatttcacatcgaacttcctttgtatatagacgttgccatgactgccctccccttctatgtggcaggtttctgggttcgccgatataatttcttcctgttccccagtcatcggttcgacaagattattccctcatttgtcctgctggcactggtcgtaatgtacttcaccgccaccacgccgggtatgcggaccaacaattatcccggcaacatattccaggtatacattgccgcatttgccggaatctttatgattatgctgatctgtaagaaaataaaaagaataagcatcgtttcttatctggggcgatattccattatcacactcagtattcatggaccgattatacactttgcaagaccggtcgtttcgcattatattcataacgactgggcagaagcaagcgcactgctcctgctgacattgaccatctgcattctctttacccctatcctgcttaagataattccacagttggtggcacaaaaggatttattaaaagtcaaataacaaaacattgtgcaagccaaacttttcttaactctaagtttaattatcaaataatttactacttttgttccaaagaactatagaccgagaacaaatgaatataacgattgtcttaggagataaaattccatctataaaatacggcggaactcaaagagtaatgtggtatctgggtaaagaactcaataagcgcggacacaaagtcaccttcatcgcaggaaaaggttcctcctgccctttcgctaaagtgatagaactggaccctagcgtaaatctgaacacccaaatccccacagacgcggacatcgtacatttcaacattcccgttcccgaaggaatcaccaagccgcacttactgaccatacacggcaatggaatcccggccaacgcagaccggaacatcgtttttgtctcacgtaatcatgcacaaagacttggaagcgaatcattcgtttacaatggactggactgggatgactacggtcccgccaacctcaccctttccagaaaaaactaccattttctaggcaaagcagcctggaaggtcaaaaatatcaaaggagctatcgccgttgtccaaagcatcaagaacgcacaactggacgttttaggcggttatcgcctcaatctcaaaatgggcttccgattcacatggaatccacggattcattttcatggaatggtagatgattcaaagaaaaaagttattattgagcagtcaaaagggcttattttccccgttacatggcacgaacctttcggacttgcaatcactgaatccttatacttcggagctcccgtattcggtactccctacggtgcgcttcccgaactcgtttcaccggaagtcggttttctgaccgcccacggacaggaaatggccgaacatatacagtcagcacaatattctccgaaagtctgccacgaatatgccagagatctattcaattcaagtgtcatggcagaagcctatttaaagaaatatgaaactgtactgaacggcgaacctttgaataaagaagtcccccatattatagatatcgcacgacgtcttccatgggactaaaaatggcagttgaattacatagctgatgagtacaatctcatttataaagcctttcattcatttaataagcgaacaaaaatgatcgaaaacactttataaaaagaaataaagccttacctttacttttttagaaaacaaaagatatgaagataaacaacagctatattttgctgaaagacatctgctgcttcgcttatcatggagtagccccccaagagaatatcattggaaatgagtatattatcaacttgaagttgaaggtagatatcagtcaggctattcaaacagacgacgtggtggatacggtcaactatgccgaaatacacgaagccgtgaaagctgaaatgtccatcccgtcgaagttgctggaacacgtatgcggacgaatagctaaaagactactggcagaatttcctgccattgaagaaatagaacttcgtctttccaaacggaatccgcctatgggagcagacatcgactcagccggagtagaactgcattgcagcagataagtacctttgctttatcagtttgtgttattatcaagaagcacattggtctgtcatcctatcatccggactgccacatccggtcaacttatttacaacaccctatcattctgcttgtgccaagtaatgggcacagttatgccaaaggagtgtcacggttgtgacaagggtgtggcacagttgtgacaaaggcttggaaacagttgtgacaagggcatggcacagttgtgccaaaggcgtggcatcgtcgtgccaaaggcatggcacaagtaaggctgcctcatttctacttgaagcagcctcacactatcatattttcagtctataacgacctatctcttctttctttttcttttatttaccgattctacagcttccgttaccacggatttgttttcgaaccgtttcgtataactggaatagtccggatgggtacgttcgtaatcgggatccataaacagagggctggaaatgatatgatccgccgtagaacggttacaacagaaaacgatgttctcaacaccggccagtcgggttaatgctttaacatccgtatcatgtggctgcaaagtcatagggtcagtgaaaaagaatagataatcaatctgaccgtccacaatacgcgatcccatctgctggtcacctcccaaaggaccggatttcagaattgtgaagtcccactccacttcaggatgcttctccttcagtgcttccagaatcagagtacctgtagtacctgtacaatagaatttatttcccatcaacagttccgagttccacagcacccattcgatgaggtcttttttcatggcatcatgtgctaccagcccgatgcctctccttacttttggttccattttgttatccttttaaatccgacaattgagagaatcttttgcaccctcccacataaaactgccacaagatactactttttatccgttcagggattggattcaaagaagtttttcttaagttttctttacgggaagaagaaaataaaggacaaatctgtttatattctttccgggcacgcatcaccgcacgggcgttgtctaactgccccttcagcagaaatgtgaatgcagccacgtaatcgagacaagtccggatacgcatcactttatttaactcttcgtccgaaagattcttatagagcatgacaagattattacgaaaattcaaaaaagtcttgcggggattctcctttttcagagttgcaccaccgacgtgatagaccgtactttgaggaatgcaaacgatttcccgaccacgggaacgtagtcgccagcataaatcaatctcttccatgtgggcaaagaaacgtccgtccagtccgcccgcctcacgataatccgcatgacggataaacagggcggctcccgttgcccagaaaactggcaggatcgtatcatactgtccctcatccttttcaaccactcccattatacgcccacgacagaacggatagccgtacttatctataaatcctccggctgctccggcatattcaaaatactctttttgccgctggctacggattttcggctgacaggcagctacctccggatggccatcaagataggagatcatcggttcaagccaatgttcggtcacctcaacatcagaattcagaagtaccacatactccgcttctacctgctgcaaagccaggttatatccatctgcgaatccatgattctgatccagcacaatgatccggacacaaggaaattcctcccgaagcatttccacagaagcatccgtagagccattgtcggccacacagacttctacttcttcgctcttcgaatagcggatcacggacggaagaaaagtacgaagcatatcgcacccgttccaattcagaataaccactgacactttcatccttaccccctttcacattcagccttagaagctttccaacgtttatgagaccacagccaataagccggttccctgcgaatcgtctgttccagataatcagcaaacatttccgtaatttctccttcacccgtctccttcggtttctctgtcatcagcttaaactcagctacacaataccctctgccgggttttgtcagatcacaatagaacacagggaagttcatcattttcgcaatgcgctccgcaccattcagaaaggcggtttcctgccccaaaaaagtagtccagtatttttcgtttccgctgggccactggtcagtaatcagaccgacaaccatctttttgccttcacgcttcaacttgataatttcgcgtgccgtagaatgtttcggaacgttatatcctccgaagcgggaacggatgcgctggaacaattcgttcaagtatttatctttcagaggtttatagacttgcatcggtacatcacccggtttcataatagatcccatcccgatcagccattcataattggcataatgaggaatcattacgatgattccgccatatttctcggtcagttccagatattgttccgtattcttataagtcatccgcttataaaggtcttcgggtgacatatgaagcattttcaagtcttcaagcatatagtcggaaaggtaacgatagaaacggcgttcgatctgcagcctttctttcttgtctttttcgggaaatgatttcttcagattctcccgtactactttccggcgatacctccctatacggtacatcaacaggtaattgaaatccgaaagtaagtacaatatccggaagggaagcgccgaaaacagccacatcccgctatataccagccaatagataaatctagacttcataattcatcagaattgtgcctttaagcgctgtcatgtcttcattaaattctcccagtcggacgttaatcatctgattgtccaatgattcgtcattctccacttctacgcggatatagttagcggtaaacccgtgcatcggtgtacctgcttttgatttttccatcaatacctgcatggtctgcccgatatgacgggtatagaaagcccgtgtcttttcatcagaaagtgtcagcaagcgctggctgcgctgatgtttctcttccggcgaaaccacataatctatcttcaaggcctgcgtccccggacgttcggagtagctgaacacatgcaactgtgtcacatccagtccggaaataaactgataagcctgttcaaaatactcttccgtctctccgcgagtacctacaatcacatcgactccgataaaggcatccggcatcacttccttgattttctttactttagaggcaaaaagagccgtatcataacgacggcgcatcaatttcagcacttcatcgcaaccggattgcaacgggatatgaaaatgaggcataaatctacgggaacgggaaacgaactcgatgatttcatcagtcagcagattgggctcgatagaagaaatgcggtagcgttcgatgccttctacctgatccagtgctttcaccagatcaaagaaagtctcaccggtagtcttaccaaaatcgccgatattcacgcctgtcagtacgatctcttttccgccttcggcagcggcctgccttgcctgctccaccatagaggcaacagtaccgttacggctgcgtccacgggcaaaaggaatggtacaataagaacagaaataatcgcatccgtcttgtactttcaggaagaaacgagtacggtcgccccgtgaacacgaaggcgaaaacgaacggatatctttggtggtagtggtaaatgcctctccctcttcatgcttatggaggtcgccgagatactgcaacaagtctcctttctgctcggcacccagcactacatctactccttttatctttgccacgtcaccgggtttcaactgtgcgtaacatccggtcactaccacaaaagctccgggatgctgcttgaccaaccgatgaatagcctgacggcatttcttgtctgccatctccgtcaccgaacaagtatttaccacacagatgtctgctttttcccctttgcgtgcagtccggactcctgcctcccgcaggattttaccgatagttgaagtctctgaaaagttcaatttgcagcctaacgtataataaacggctgtcttattttgaaatacagtggtatctatcataatctgttataacgcatatttcctgcaaagttacacattattattagtaaaacactttaggatacgaaagtttattcctatttttgcacaattcactaaaaaacgtgcaatgattaaagagaatttcattaaactatacgaaaatagttttcgggaaaattgggatttaccttgctataccgattatggtgaatccgttcattatacttatggccaggtagctggagaaatcgcccgtatgcacctgctcttcaaacactgcagcctgcgtagaggagataaaatagccgttatcggcaaaaataatgcccactggtgcatcgcctacatggcaaccatcacctacggagccatcatcgtccctatcctgcaagactttacgcccaacgatgtgcatcatatcgtcaaccattccgagtccgttttcctctttaccagtgacagcatctgggaaagcctggaagaagaaaagctgaccggactgcgcggagttttttcgctcaccgacttccgctgcctctatcagcgggacggagaaaccattcagaagtttctggtacacctcaatgatgaaatgtacgctgcctatccaaaaggattcacgcgcgaggacattcaatacactacgttatccaatgataaggtaatgctgctgaactacacatcgggaactaccggcttcagcaaaggggtaatgttgacgggcaacaatcttgccggcaatgtcactttcggcatccgcacggagttacttaaaaaaggagataaagtgctttctttcctgccactggcacacgcctacggttgcgctttcgactttctgactgcaactgctgtcggaactcatgtcaccctgctcggtaaaacgccttctcccaaaattatcatgaaggcttttgaggaggtaaaaccgaacctgatcatcactgttccgctggtcatcgagaaaatatataaaaatgtcatccagccgctcattaataagaaaggtatgaaatgggcgttaaacattcctttgctcgatacccagatttacaatcagatacggaaaaagctgatagacgccttgggcggacgtttcaaggaaatcatcatcggaggcgctgccatgaatcaggaagtggaagagttcttctacaaaataaagttccctttcaccatcggttatggcatgaccgagtgcggaccactgatcagctatgctccctggaatgaatttattttaggctcttccggcaaagtgctggatatcatggaggcacgcatctataaagaaaatccggaagcggaaaccggagagattcaggtacgtggcgaaaacgtgatggtgggatattataagaatccggaagccacgcaggaagtgtttaccgaagacggctggctgcgcaccggcgaccttggtactatggacgccagcggaaatatcttcatccgcggacgactcaaaagcatgattctgagttcgagcggacagaacatcttccccgaagagctggaagccaaactcaataacctgccattcattcttgaaagcctcgtcatcgaacgcaacaagaaactggtggcactggtctatgcggattacgaagcgcttgattctctcggattgaacaatccggataacctgaaaaccatcatggatgaaaatctgaagaacttaaataataatgtagctgcgtatgaaaaagtcagcaagattcagctttatcctacggaatttgagaaaaccccgaaaagaagcatcaaaaggtatctatataacagtatagctgtcgattagtatgttttaaaacatggattgaaggcgtaatataacaagcttctaaaaaaaattataaaaatagttggcttttcgagaacaacatattgaaaaagtacataactttgcagcgttttaataaagcaattgattgtattacgtttttaaaaagcaaagaaaatgaaaaaattagttttgatggccgtagctatcgtagcagtatcattcgcatcttgtggtaacaaagcagctgacgcagcaaaagctcaacaagattctatccgcatcgctgactcaatcgcagctgtagaagcagcagcagctgaagcagaacaagcagcagctcaggcagcagctgactctttgaatgcagatagcactgcaactgaagctgtagctgaataattcagaacagcctagagagaattgaaagtctgacatgctaaaagcatgcacagacttttttttatgccttatttagcgtatgagcttttcacaaagggagcatccagcaaataatccagacttacctcgacacttttctctacgggcatgctgtagctttctatctctgcaacaagatgcttcacaccagctgtctttgcattcttgaaaatagcgtcgaaaccaaccattccgctctgcccgatttctctgtgatctttgatatggaacattttaaaacgaccggggtatttattaaaataatcgaccggactgttttgtccgcgaactacccaataaacatccatctggaagaaaacatattcaggattggtatgctcaatcatgtaatcatacatcactttatcttctaccttctgaaattcatgagcatgattatggtatccgaacgacatcccctgctgtttacaacgtttgcctatttcattgtaataagcacaatatgtatccaactccttaagtgttttaggcacatccatccaaggagctacaatgtaactcataccggcagctttatgatcagcaatacactggtcccaccattgaagtgaacttgaaaaatcaccggaagctaattcttctttcgacaatcctcttgtgcaatgtgaggataaaaccttcagcccggcagattcaacatcttttttaaattggtcgggagttctgtcgtaaaactttccattattataattggcggcttccacactggtatatcccattttcgccaagttcttcagaagagtaatataagcggcgtcacatttgccgtccttattgtctaccttattcaatatatccctgacagaatagagttgaatcgctacttcttttttagctttcgcttttgttttagactgtgccatggccgtaaacggaatcattaaaagaagagccagcgcacatagatttatttggagtttcatgtttgtagataaaggggttcatgtattaaaataaaaaagctgtgtcagaagttcgtcgggcatatcattctgtcattcagaactaaatgccatgttgatgttacttttgacacagcctatctttgaattatttatgtgatcagtccagaactttcacgcggatattgcggaaccaaacgtcatcaccgtgatcctgcattccgataaatccttcgtggttttcgccaccgcaattattcagcagttcgaaagccaacggccatttgtcctggctgaatttgctggcttgcaaaaggtcagtccattgtttggtccacaagtggtattcgagtacattctcgtcattctgtccgtgaacaacagtacctttataaaccatgatcttagccttgttccattcgccgaaaggtttcgcattctgaggaactgccggaatcatgtcatataaagaagccgactgacggttattgtctttacccaattttgcatccggatgattgtcattgtccaatacctgatattcaggtgcggaaatataaataggttcgagcacgtcgttaccgtccttatctttagaagtcacttcctgagccagatagaagataccggagttaccgcctttggaaaccttccattccatttccagttcgaagtttttgaatttgtgggcaaagatcaggtctccgccatcaccatcctgcgcttcaccgccaccggaaccgttaaacttgatgcaaccgtcttcgatagtccatttggaaggaactctgtccttgccataaccacgccatccattaaatgttttgccgtcaaagatagtgatgtaaccatccgcatctaccggtaattgcaagctatccatctctgctgcttttaatgattttgaatatgataatgctacttcgtttgccgattgctcttcctgagcactcccggatttcttctgaccgctgcaggaaactaaaactcccgctgcaagacaacaagctaatggataaaatactttcttcataataataactatttaatttttaatctttaattcttaacttacttttatcgtgttatcgtggcatatcaggcaacttccatccttcgcgatagttatgtttcaccagttcggctgcgaattgtttcgcgttgatcggatctgtccaggtcttgttgaatgacgggtgaccatcatgaatcgtaaatccgtccttaatgcaggttctgagtgtttcattatcaccgatattggtgaagcacatattggcgccgtcccattccagtgtcttgttcaaaccttgcagacggatagccaatacacccattaccaccatttcattcatcggtcccgattcggagaaatccgctttcggcatcacgcggttggatttgtcttccttacaagcgcgtacccagtccatctcatgagaacacttgacacggcggcatactttcggtgcattgggcacacggcctgacaacaagaaaggttgttctccgtagcagccgcaaatcaatgtatcttttgttccgtggaaaatagtcagaccaccaccggggcccatcagttgttttccttccgggaaacctttcggacgttccggcatcataccgccgtcataccagtgtacctcaacttccggcaaggcaactttcggcatattgtcgcgggcggggaaaatcatcttcacgtgctgggcctgaggagcgcaggcactcagtaataatgtagaagaaccttccaccttggtaggataacccagtttcagagctctgaacggctgatgcagaatatggcaggccatatcgcccagtgcacctgtaccgtaatcccaccatccgcgccagttccagggatgataaacgttgttgtacgggttcagtttggcaggtccggtgaaaagatcccagttcaatgtgttggggatgcggtccgccttttcgggggcattcagtccttgcggccagataggacggtcggtggcgcattccactttggttacttcaccgatttctccattccatatccattcgcaaaccaggtcggtaccttcgcccgatgctccctgattacccatttgagtaactactccggtagaggcggccagcttggtcagcaaacgggattcgtaaacggagtgagtcaacggtttctggcagtatacgtgcttgcccattgtcatggcgtctgccgtgatgatggcatgagtatggtcggcggtagcaatgattacgccgtcaatggatttgcccatttcatcgtacatcttgcgataatcccagtatttcttcgcattcgggaattcatcgaatacgcctttggcatatttccagtctacgtcacaaagggctacgatgttttcggtgcccttcacgttgttgatgttggcatggcccataccgccgatacctacggctgcgaggttcagtttgtcggttggtgaaacgtgcccgtggctcatacctaaaatagaactgggagcaatggtgattcctgctaaagcagcggctcccgttttaagaaattttcttcttgaaaagtctgacatggttttattattttaaggagttagttatttgtggtggattactatgcagcaacccatatccatttttcatgttttttctgcgttcgcgtatttgttcaagagtctgtaaattgccaatagccggcaagtcattcatacgagcatcctgcaggaacttccacgcatattcggatgcaatagtcgagtcatacattaaaggcaaacgagggtttcgcttaccggtcaatatggaatcggcgaacaaatcgcacagcacgtcaatattcttaccaccaaaaggtttttccacacgaagtgtctgatgtactccgtgtaaatcgacgacagctgttttgaaatcatgcgtcatacgcacgataccttccgtacctataatatctacataagaattgtgcgtctgatctttcgataattgtccatagacaaaaccctgggttatatcaaagactacgccattttgaaaagttccgtgacattgtacccaccagggatctttataattccacatgttcacgccttgtgcattccatgttctatattcactttcggcataccagcgaacgatgtcaacataatgcattccacaatcatggaaagcaggaccttcatattcgtgtccttcacccggtgccagtcccggagtcatgtggcaaatacgaataatggccaactcacctatttctcccttctgaatatattccttcatcagattatgataccaagaatttcgcagatataagttcaccgtagaaagtacattggagttttctatcatatccaccaccttccactccttttccatcgtatctgcaacgggtttttctgcgatgatatgttttccgtaccgaatagccttttctatttgttcgagccttgagtctgccaatgtgaagagcccgacaacctgtacactctcgtcttcaaagattttttggtcattctctactacacgagattcaggagatatttttttagcaagttcgcgcgtggtaggatctgtatcgcaaatataggcaatctcccatcgcccgcttttccgcatcgcctcccaatagaatcttcccattctaccgaaaccgattattcctacttttatttttgtgtcaagtgaaaattgtgcatccataaaaaattgcgaatttaagtacaaacaacataaaaggtatcaattttcatctgtaggcagattgttcgaaaactgatatcgcaaaactagccaaataaataacgctttatttagtctacacaactttatgtagattataaaataatattaaaccttacaaatcaacaacttacaatcatttaggaatataaaaaatgtagattgtttggaaagcattttatttattggatggcacaaattcgtttatattggtcagattttcataatttcattttcaaattcatcccggtccactgcagccttgttacgcattttagtacgataattataaacagtacttgtagagcaacgaaggaagttggcaatcttcccgctatccgtaatacccaaacgtaacaatgcatagatacgaagttccctgttcaacaaagcgtcctgcttaagaatgatcttctcgtcatctttcagtaaagcattgaaatctgaaacaaaagtcggatataaattcaaaaagactctatcgaagcgagtatacagagcatcaagttcatcatcaatcaatgcggaagatttcagctttttaatcagttcctcatagcacttattaatggctattttatacagcatattctgatacttctccattttatgaatatagctgaagcacacgtcgaaaaactgagcgatataatgctcctttatattattaatctcgcacagttcatcattcttatcattcaactcactattcatgctgttcagtttgtcgttcaatctcagaagctcctcgttactttgtgccagcgcccgtttcatccgcaacgtttttttcatctgaatataaataaacacaaccaacacgattaaaagaaaaagagaaacgctggttgagataagaaaagtaatcagattcgatttagacctagcttcttccgtctgataagccgtattaatgatagaatagaatttatagatttccattgcccggaaatgaatgccggaggaaactacatcatcaatagccgactgagtaaatttgaaagcatccgctaaattattttcctcatattgtatcagtgcaagtgcctgcaaggaggccgtttcacgtgtggcattctgaatatcagcaatggcggacatcataagatatttcttcgcatcatcctctcttttcaaatagcggctcaacatggcatacgaatgagtaatcatcgcataattaggagttcctatctcctcagcattcagcaactcatccaaaatcttgatcgcctttgttgaatcgcgtcctgcataagaataagcccgtgacaatttatagtcaaaggaagtatgatccataagagcatacagtgaatcctgataaacttcccgtttttttccgtactgattattggtagcagaaatcgaataatactcccaaaaacgggcatatgtatcataataagtagctaataatgaacgaggaagttctgatggcttcattttttcgagaagtaattctgcatctctatatctgccgcacatggaatatacaaggctgagttgcaaagaagactggtatttcaaatagtttctatttaactgacgagcgatttcaaggttccggtcgacataatgaatggcagagtctatattaaatttcttatactcattgtataattggagattcaccttatattcccgatcgggagtcagcccagagtccttcagtaaacatttaatccgggcgattcgctgctctttcttctggacgaagagaggcttcgcatctatcattttatgcagagagtcagccagtattttcaattcgttatttgcataaagagcattgccgattcccagagcaaccaggaacagcaaaacgattctcttcagataacaacggttgaatttcatattactagcaaagatgataaaaaaaagcgatttatccatcagaacaaatcgcttttttaatatatgaagtaaatttgctcttattcagcaactacttcgaaaggaatttctacagaaacttccttgtgaagtttaacgatagctttgtagttaccaacttctttcactgcgtcttttacaacgatgatctttctgtcaatttcgtgacccagttttgccaatgcttcagcaatctggatattgcttacagaaccgaagatagtacctgttgaactaacttttgttgcaatagtcaaagaaacgccttccaacttagcagccaatgcttcagcatccttcttgattttctcaagtttgtgagcacgttgtttcaagtcttcagccaacattttctttgcagaaggagaagcgatgatagcttttccagtcgggatcagataattacgaccgtatccggatttcacgtttacgatatcgttcttataacccaagtttacgatgtcttctttcaatataatttccatacttttcctccttcttatttcatcatgtcagttacataaggcaacaatgccaagtgacgagctctcttcacagcctgtgcgatacgacgttggaacttcaaagaagtaccagtgatacgacgtggaagaatttttccttgttcgttcaagaatttcttcaagaattcaggatctttgtagtcgatataacggataccgctctttttgaaacgacagtattttttcttcttaacgtctactgagggcggagttaaatatctgatttctgattgagtctgttgtgccatgattaatcctcctttttgtttgatttaacacttcttcttttagcagcatattccgcagcatacttgtccattttgaaagtcaagaagcggataacgcgttcgtcacgacggaagttaagttccaacttgtcaatgacagtaggatctgcattgaactcaaccaattgataaaaacctgtagacttcttctgaattggataagccaatttcttcagtccccagttttcttcattgataatctcagcaccttcagcttgaagaatacctttgaatttttctaccgcttccttcatctgaacatcagacaaaacgggagttaaaatgaaaacggtttcgtattgattcatactcgtttaattaaataaataatttattttattttaaaatgtgggtgcaaagttaggcattttattttgaactacaaatatttaatctttttttgtatcctaatataggaattatccgggaagtggcttacctttgcaaagttgtttaaacaataatttcatgatagagcaatttaatttcgatatccggcttatattcgccatcctaaatggtaaggtttccgctgcaatcaatcggaaactgtatcgtaatttccgtcagaacggtctggaaatcagcccagaacaatggacagttctcatttttctatgggaaaaagacggcgttacacaacaagagttgtgcaatgcaacttttaaagacaaacccagtatgacccgcctcatagataacatggaacggcagcatcttgtagtacgtatttccgacaaaaaagatcgccgcaccaatctgatccacctgacaaaagacggaaaagaactggaagagaaagcacgcatcattgcggggcagacactgaaggaagctctgcatggcatcactctcgaagaactgagcatcgggcaagaggttttaaaaaaggtattctacaataccaaagactaaacagaaaaacaatcgtttaattcataaaatccactaaatctgtctttataatggatttttcacctaaattatttcgcccgttaaagaattatgctttaatttgtgactggaatattataatctattaaaatacacacgcatgaaaggcttattaaagaatttgggattgatattaatcttgatcggagtggtcatcctgttggcttgttcctttaccggcaatgtaaacaacaacgcggttttgggcagttcagtattcctcgtagtactgggactcatttcttatattgtcattaataagaagatcgctgattaatttattagaaatcaataaaaaatcccgggaacgaatgtttccgggattttttatttttggttatcggagtactcattaagattcaacttccggtgtgatcagcttatagccttttccgtgaatattgataatctcgatagagtcatcttctttcaggtgcttacgcaacttcgtaatatacacatccatactacgggcattgaagtagttatcatcaatccagatagtcttcagagcaaagtcacgttgcagaatttcattagcgtgtgcacaaagcagtccgagaagttcagattctttggtagtcagcttcgtctgcttgccttctgtagccagaatttgtttctgagtatcgaaagtaaacttaccgatcttgtagatattgctttctttgttcttctttccacgaacacgtctcaagatagcttcaattctgaaagtcaactcttccatactgaatggtttcgtgatataatcatccgcaccaatcttaaatccttccaggatatcttctttcagcgtttttgcagtcaggaagatgataggtatctcagcattcgcagcacggacatcctgtgccaacgtaaagccatcctttttaggcatcataacgtcaaacacgcacaagtcatatttattcttcaagaaagccttataaccggcttctccatcaggatataactcagcagaataaccttttgcctgtaaatattctcttaaaagcatgccaagattttcgtcatcctcgcataataaaatacgcagtttctcgtccatatcaattattttttaataaaggtaatgcaataataaatttagttcctacgttcaggtcgctttctgctctaatggtccccttatgatcggtaataattttcttcacataagccagccccagtccaaagcccttcacatcgtgcagattacccgtatgcacacgatagaacttttcaaatatctttttcaggttttcctttttgataccgataccgttatcctgtatcgaaatcatcagttttcccgattcattccacgttttcactttcagttccagatcttcttccgctttcttatacttcaccgcattatccatcagattgaagatcacattggtaagatgcatttcatctgcaaatataacaggatcggctgcctcaaggttcgatgttatcttaccattatatcgttctactttcagtgcaaaggtattgatcactcccgaaatcagttcatttgcatcaatttccttcatcttcagtgttgccttctgccggtcgaacattgacatctgcagtaccttttccacttgaaagcgcaagcgcttggtctcatcatttatgactcccgatatatgctggaacatttgcggtgattttgctaccgcggggtccttcaacatctgcgctgccagcgagatagtcgatatcggcgtcttgaactcatgcgtcatgttattgacaaagtcattcttcatctccgtcaacttcttctggcggaatacgatataaatcgtaaagatgaatgtcaccaacaacaccaacgtaaatatcagtgacggaatcatgaaactgatcgaatcaaaaatataatccttctttcccgggaaatgcactttcagaatactcatctttgcaggcgggtcgtttttaaacaatgcctgctgataggattcttcacttccttttgcttcataatctgcacaacggtatacttcacgtccatccttgtcaatcactgcaaaatgataaggcaagtctataccattattatataagttcgatttcagataatcgtcaaggtccctgaaccgtactctatcaccaatcgacttgtcactcgcacgtctaatcatgtccaacactacttcatccaacagtgcccgctgatacatatagcgattcttgatagcttccaacatcgaattagaagtctgaggaatcgtgtttcgtccacgtaccatcgctttaggaagttcagacggtttgatcttcatcaccctcaattcaaagtcagaaataatcttgccatcccgtgacttcacttgaaatcgctgtgtcccccgaactacattattctgccctaatgaagtattgttttcagtcagcgcttttctttcagcatccgaaatatcctcaaccaaccagcgcatagtttctgcatattctacatccttggaaacctgatccaaactgttgcgcacagccgaatcaaattgctccttccgggttttcatcatttcctctatataactgacctgcaaatacaacagactaaggaaagaaagccccattacaatacttaatatccaaattgttgacttcttcatagcaacaaaattaacactccctaattaacactcctaacacattaacttgatttaaccggaagttcccggaaattaaccgtaaagagctatttaggttgtattctgattactacaacaatataactcctcctttggtttgcaaatttaataaaaaattaaatcttttccttgcgattttccatctttattaatcatagttaaacaaaaaccgctgccttttacttaaaaaagacaacggttttaacagttttgagagaattattgtttattcctctgtttgtttagcttcaaaatccttaatcaacttatcctgaacatctgtcggaacaagttcataactagcaaacttcatgataaatgaagcacgtccgccggtaagtgaactaagcgctgtcgaatatgaagacatttccttcaaaggtactttagcaacaagtttctcgaaacctttttcgctgctcatacccataatcatggcacggcgcccttgaagatctcccatcacatcacccattctgtcggacggaacaaatacttccacatcataaatcggttccaaaatcttcggaccggcattcttgaaggcttcactgaatgcgttacgtccggcaagcataaaggagatttcatttgagtctaccgggtgcatcttaccgtcatatacgattacacgtacgtcacgggcatacgaacctgtcaacgggccttgttccaggcgtgacatgatacctttcataatagcaggcaagaaacgggcatcgatagagccacctacgatactgttaataaataccagcttaccgccccattccaatggaatttcttcagtgcctctcacggtaatcttaaattcctgtccattaaacttgtaagtatcgggcacaggcataccttctttataaggctcaacgatcaggtgaacttcaccaaactgaccagcaccaccggattgtttcttatgacgatagtcggcacgggcagccttcgtaatcgtttcacgatacggaatcttcggttcctcaaatttaacctgaagtttttcattattttccagacgccacttcaacgtacgcaaatggaattctccctgtccgtgtaccagtgtttgcttcaactctttcgattgctcgatcacccatgtcggatcttcttcacgcatacgattcaagatggtcatcatcttttccacgtccgcttcgttcaccggtttgatagcacgggaatatttagaattcggatatttgataaagttgaatttataatcgcagtctttaccgttgagtgtattgcctgtcttcacatctttcagttttacggcagcaccaatatcacccgcctgaagttcttccactttcacacggttaccaccggctacgacataaatctgagcgatacgttctttcgaaccacggtcggcattcagcaagtcatcaccttcacgaaccttgccgctcattactttaaagtaagatacttcaccgatatgcggctcgacactcgtcttgaagaagtacaaagattcgggaccgtttacgtccggagccacttccttaccatctgtgttttccactttcggcatttcagacacaaaaggaactacattgccaaggaattccatcagacggcgaacgcccatgtccttaccaccgcaaacacagaatacagggaacatacctctggcgatcaaacccttacggataccttcacgcatttcatcttctgtcagagaatcttgttcgaagaatttctccatcagtccttcgtcattttcggcagcggcttctaccaatgctttatgcatttccatagccttatccatttcttctgccggtatatcttcaatcgtaggagcaccgccttcgggtctccacgaatattttttcatcaacaatacgtcaatcaaggcattaaagcccggaccggtagcaataggatattggatgggaaccaccttagatccatacgcttctttcaattgttcgaggatattatcatagtcgcatttttcattatcaagctggttgactagaaaaataactggcttattcaatttttcagtgtatcggaagtgattttgtgtaccgacttcgacgccgtattggccattgagaagaataattgctgtgtcggtcacattaagtgcagttaccgtactgccaacgaagtcgtccgaacccggacagtctataatattaagctttttattgttccattctacgtggagaacggtagagaaaacggagtaaccatactcttgttcaacagggaaataatcgctaactgtgttttttgcggcaacagatccgcgacgttttataacaccactctcgaaaagcatcgcttccacgagagtggttttcccagagccagaacttcccaacaaggcaatgttcttaatttcattagtctgatatactttcataatatataagattttagtaattactcagtatgtttctcgcataccattaatttagtgttgcgcaaattagggatttattgggggaaaagcaatatttatgacagtgttactaaacaatgttatgtaacataaggtccgttttatggttaccaggcaggccaaacttatacctaattcccgttaattgtatcaatagctcagaaaaaaggtttaaatttgcaggctataatcaattggtaacaaactaaacatctactatggcaggtatttatcttcatatccccttttgtaagacacgttgcatctattgcgatttttattcgactacccgcagcgaattaaagacgcgttatgtgcacgccctctgccatgaactgggaatgcggaaagaatatctgaaaggcgaacctatagaaaccatttatttcggaggaggaactccctctcaactggaggaagctgattttaaacgcatctttgaaactatacgggaaaattacggaatggaacactgccgggagattactctggaagccaatccggacgatctgtcacaggaatatctgaagatgttatcctcgctccctttcaaccgtatcagcatggggatacagacttttgatgatacgacactacgattactgaaacgtcgccataattcccaaacagccatcgaagctgttcgcaggtgcagagaagcgggatttcagaatatcagcattgatctgatttacggactgccgggcgaaacaaagggacggtgggaaaacgacctccggcaagctatccgcctggatgtagagcatatttctgcttaccatttgacttacgaagaagatacacctatatataatatgttgaagcagcatcagatagaggaagtagacgaagattccagtctgcagttctttacattgctgatcgaacatttgcagaatgcaggatacgagcattatgaaatatccaatttctgccgccccgacaaatactcccgtcacaatacttcgtactggaggggaataccatatttgggctgcggaccgtccgcacattcattcaatggagcaacacgcgaatggaacgtatcttccatcgacctatatataaaaggtatagaaagaaaccaacgcgactttgagacagaaaatctaaaccaaacgacccgttacaacgaatttatcattaccaccatacgcaccgtatggggaacacctatagaaaaactaaaacaagagttcggtaatgaactgtgggaatattgccggaaaatgtctgccccctatctggaaaatgggaaactggaagtgcacgagggggctttacgcctgacacgggaaggaattttcatctccgacagcattatgagcgacttgctttgggtaaattaaaaaactaaacgatcagccgatgaccgaatcagaagtaaggaagttattacggcaaatgaaggaactggactcgcaaacagccttccgcgacttctataacatgacttacgaccgactcttccgcatagcctactattatgtgaaacaggaagaatggtcgcaggaaatcgtactcgacatcttcctcaaactctggaagcagcgcgacacccttcttgatgtgaaaaacatcgaggactattgctttattctggtcaagaacgcttctctcaattatctggaaaaagagtcgaagtacgccaccatccattccgattccctgccggagccacaggaacgaagttattctccggaagagtcattaatcagtgaagaactgtttgcaatctatgtgaaagcactcgaccggcttccggaacgttgccgggaaatattcatccgtatccgtgaagaaaaacaaagttatgcccaagtagcagaagaattggatatcagcataaagacagttgatgcccagctacaaaaagctgtcacccggctgaaagagatgatttcgtccagtgggtaaccggatatcacccgaaccgttcagcacttcttttttatattaacttttatttgcacaaaaggcgtagggagtttctgtcaatctccggtctttatcagcaaataaaccgattaatcactaaaaaagattgaatgatgaaaaagtttaatgacgcaaacgttggactctttgtccttttaacagcatgcctgagcctattttcctgcaacaacgacaatgacaattatcctaaggattatgtaggatttgaaaaatctacccgaacagtagaatgtgacaagaatcaatccgagagtgagttgcagattaaaattattgccaccgacaaatccaaagaagacaggacagtgctacttgccactcctgctttgccggcgggacaggcaccgattatgaaactgacagaaaccaaagtcaccatcaaggcgggacagaaatcggcaacgaccaccattaagttatatcccaaaaagatggtactgaaacagcagaacattaccttatcctgtactccccagtggaaagaaggcagtgtaagcaagctgacgattctgctgaaacggaattagaaagaaagctaaatagaaaaagatatgaaatataccgatagagaattagaagacatactgaacaaactcatcgcttccacccgctcaccgagaggacgtttttcagcagcatccagctatccgcagctggagaaaaagctgaatttccgcaaccaccggttgtatctgacacgcacatttgcggcagcggcagcagtagttttactgtctctatcggtatggacagcttatctgtacatgcagccggcaaccatacagactgttagcactttggcagaaacacgtaccgtccgtctgcccgacggcacttccgtcacgctaaaccattattcttccctttcctatccggaacggttcaaatcggatgaccgggaagtggagttgagcggagaagcctattttgaagtaagtaaagactcaaagcatccgtttatagtgcagacagaaacaattgacgttcaagtattgggcactcacttcaatgtggacgcctatcccgacaatccggatgtaaaaacgactttattaacagggtcggttgcagtcagcaataaaaacaactcagtacgcatggtgctgaaaccgaatgaggtggctatatataataaggtggaacaaaagcttacccgcaaggtactggagaatgccggagatgaaatttcatggcgccatggagagttcatattcgatgatctgccgttgcaggagattgcccgcgaactttccaactcattcggaacaacgattcacattgccgactcaaccttgcaaaattatcggatcacagcgcgattccgtaatggagaagacttggatgcgattttatctgtactgcataatgccggttatttcaactattcacgaaacactcaacagattactattactaaaaactagactaaatgagaactattcaccaaggacacctgcctgtcagaacgctcgttctgataggtatggtgatccttatcaccgcacaggcatacgcacagaatgcaaatgcccgactcacaatcacattgcgaaatgctacattgaaggagttcgtcaagttaatcgaaaattctacaggatattcttttatctacagtgaagaaatcagcatcagccataaaatcaatctgaaagcgaaagatatgcctttgcatgagatactggatctcgtattcaaggatgaaccgatcagttacaagttctctgagaaatacattctcctgcaaaagaaaagggtgcaaaagccggtaagccgcaagtttactatcagcggatatgttaccgacgggacgtcttccgagacgttgattggtactaatatcattgagagtcatcaatatcaaggcactactaccaatccttacggcttttatagtatcactctgcccgaaggagaaacggaattacgtttctcttatttgggatataccacagaaacacatcatttcacccttgctcaagatactctgctgaatattcgtatgaaaggaaacgcacaattagaagaagtagtggtcgtttcagataaagcagaagcagggacagttgccacacagatgggagctgtcgagattccaatggtgcaaatcaagaatactccaagtatattaggagaatcagatgtaatgaaagccattcagttaatgcccggagtacaggcaggagtagacggatcggctggattatatatacgtggtggcagtcccgaccaaaatctgatcttacttgacggaactccggtatataacgtagaccatatgttcggcttcttttccgtctttactcctgaagctatcaaaaaggtcactttatttaaaagttcctttcctgcacgcttcggcggacgcctttcttccgtcattgacgtacgcaccaatgacggggatatgaaaaaatatcatgggacactcagtatcggcttgctaaccagcaaaataaatttggaaggaccgattgtgaaagacaaaacatcattcaacatatccgccagacgttcgtatattgatttaatagccaagccattcatgcccgatgatgagaaatacaactattacttttatgatatcaatgcaaagatcaatcacaagttttccgaccggagccgtttatatctgagtgcttataacgggaaagatcacttcgctacccaatatgatgataatagcgatttcaaggacggaagtaaaatgaactggggaaacacaatcatttccgccagatggaactacattttcaataatcgcctgtttagcaacacgacagtttcctacaacaactacctattcaatgtaagtgcatattcgaataatcaatattcactcaccaataacacaaccttcatcaaccgatactcttcagactatcgttcaggtatcaatgactggaattatcagatagattttgattacaacccatctcctatgcaccatattaaatttggagcaggatatatctatcaccgttttcgtccggaagtgatgacctccaaaatatcagacaaggtagactctgaggcatttcgcgacactacttaccacagtatgaacaacagccggatttatgcacatgaagtatcagcttatgcagaagataacctaaaaatcagtactcgtctacggcttaatcttggattacacttttctctgtttcaagtacaaaaacaaagttatttctctttgcagccgcgtgtctcaacacgttatcaactaagtaaagacgtaatcctcaaggcatcttatacaaagatgagccaatatgtacatctgctttcttccatgcccatcgctatgcctactgatttatgggtgcctgtcacaaaaaaaatcaaaccgatgcgatctcaccagtattcattgggaggatattatacaggtatcaaaggttgggagttctcagtagaaggctattacaaagacatgtacaatgtgctggaatataaagacggagtcagttttttcggttcttccaccggatgggaaagcaaagttgaaatggggaaaggacgttcgatgggaattgaatttatagctcaaaaaacgctcgggaagacaacaggctggttgtcttataccttatccaaaagcgaccgcaaatttgctaaaggtgctatcaacaatggagagcgatttccatacaaatatgatcggcgccataatattaatctgactctcaaccataaattcagcgaacgcattgacatcggtgcctcgtgggtgttttacacaggaggaaccagtactattcccgaagaaaaaacaaccatcatccgtcctggcaatggagcaaacaatggctttattctgggatttgataactactacaatcctatttataacaattcccctaatgttggagaggccaattacatagaacatcgcaataattaccggctacctgcgagccaccggttgaacatagggattaatttcaataaaaagaccaagcacggaatgcgtatctggaacatcagtctttataatgcatacaactccatgaatccggcatgggtatttcgctctcataatgacgatggaaaaagtgtgatcaaaaaatataccctgctcccctgcattccatcttttacttacacttacaaattctaagttaacatgaaaacttatatatatcatccgcttatctcgctagttataatactggtgacagtatcttgtgaaaatgaactcccttttaatataaaggataatcctcctaaattggtaatgaatgcattcattaacgctgacagtctgacaaatgtcttattccttaacctgacgggaaaagactatgccaaccacattgaaaatgccactgtagaggttcacgtcaacggagagttaagagagaccttgcgcccactcccgatggaaactgagtatgacaagcaatgccggttcaacatcacaggcaaatttgcttcgggagaagtagtgcgtattgatgccatgaccgatgacggcaaatatcatgcctgggcagaagtcaccgttccgcaacgccttgataaaatagaaaacatcgacacgctcaccgtcccgctaacacaaaacggacatactcaagactacatgcgctacaaaataacttttaaagaccacccgaacgaggcaaacttctaccgcattgtagtagataaacaaatgcgactatggggatacaaccacgaagaaggaggagaagattaccttcactggacaaagcatatcacttattcatttatcggacgcgaagacatagtactgacagacggtcaaccttccacaggagatgacgaagacaacggactgttcgacacagctaaaaacatttatggtgtctttgatgattcgcgatttagagatacctcctatacaatgacggtctacaacgatcccgccatcccatacaacaacaattacaacggatattatgaaggaatggatgtcatcatccgtttgttgagtatcacggaaacagaatattactatctgaaagcactcaatctagtcgattccgacgtttatgacgaaacaattaacgaacctctcagatatcccagtaatgtacatggaggtacgggaatgataggtatcagcacggaagtatctcaaacggttcgaatcagggaaaataacccgaaatgacttgcaaaaataaatataggagcaggattcataagtaactttcatctaaaagatacccctgctccaccaatccccgcttatcagttagttccatcaatactccctcccgaatcaagacaagtcgattgacaacctctaagactttttcgtaattatgatcagcaatcactatccctttctcttccgaatgtttttttattaacccgatcagtttatctaccaaatgaaaggataaataatcgaaaggctcatccaacaggacaaatttggcattgcccagcaaaagcaacttagcttccaaatatctccgttcacctccggaaagttgggagacacgccgttccatacacgactgggcaacttcatcatcctcataaaaatagggaacgacattagcatccaggtaacagtctaccaatttatttatcttttcatgcttgggcaagtagccttgttgcggcaggaaggctattgtccttgcatgttggtaaggagccgaaaggaccttacattcatccaaccggataaatttccggtctgctttcattgttccgaagattatttgcatcaacacggattttcccgtaccgttcctgccgaacaatccaataacatcacctgtatttattttcaggtaaacatcagtcagcagttgcctggtaccgaaattcttaataatactatctatttcaagcaagtgatgcataattttacaatccaaagtacagaccaatatacagcaaacacaaagacaatcaaattccgtttcagaattccggaattataatagaaaaagtaggcttccttttcaaaaaactccttataaagcaaactgacaacaattccccagccacccaatagataaggaaaagcttcccaaaacaagctccagtcagcttttgatacaataagtgcacctaatatagacagcggaacgtttattttcaacgtactgtggaaaaacaaataatatagttttagtctccgcatatatcttacattaatttgacggctataaatatatgaatttaaattagacatcttactaaaaaccaggcttcaatttctgtttttattccaaattcgctgaaagtttcctttcattttacgaacgtctccaccgactttaattaggaacaacgatctatttcaattatctttgtagccaaaaacaggcacttactatgtttatcatcatcggaattatgctgacaggaatgcttctgggcttcctgctacgtaataaaagactatcttggatacataaaataatcaccctgctgatatgggtcctgctcttcctcctcgggattgatgtaggaggaaacgaggctatcatcaaaggactgcatacattgggactcgaagcactcattatcacactggcggcagtgatcggcagtatactttgcgcatggggactctggtacctattatatataaggaataaaggaaaggagacggaagtatgaaaggaagtctgatcatcgtctcatttttcattctcggtaccctttgcgggttttatcatctgattccttacgattttacggatagcaaactaagctattacgccctttgcggactgatgttctgcgtaggtatcagtatcggtaatgatcccaatacactgaaaagtttccgttctctgaatccccgcctgatgtttctccccgtcatgacgatactgggcacattggcaggatgcgccgtagcaggcattttcatgagccaaagaacctcttcagactgtatggcagtgggagccggattcggctactattccctttcgagtatattcatcaccgaatataaaggtccggaattgggaacaatcgcattgttatccaacatcatgcgtgaaatcatagcattgctgggagccccgttactcgtgaagtatttcggcaaactagcccctatttctgtaggaggagctaccacaatggacactactcttcccatcatcacccgatgttccggaaaagaattcgtaatcatttctatctttcatggttttgtagttgatttcagtgttccatttctcgtcaccttcctttgctcaatatcattttaacagcaatattccttaaaattcagttatattacattttcgtttccgcacacgtattgcaaaaatgtttcagaataaggtctttttgtatcaaaaagcagttgatttcttgatttacatcaagaaatcaaccgaaacaaaatcttttccttttctttatttttatgctataaaacatatcgctatatttgcataggtaaaaagaaaaaactaagcgattagatcagttttcaataggtattagatttgtttttaggaatagtttttaggtataacaattaaaaagtaggtattatgaaacgtttaagattaacattagtggcagcactctgcctcgctgcttcgacttttgcagcaggaaaccaacctacaactgcaaaatgggaaggtaacatcaacgtaaataaattaggtaaatatttgcagttaaactctgttcagagcgaagaagtagcaaacatctgcgattatttctcagaacagatgtcaagagccactacagccaagaaagataaagaagcaaaattgcgcaacgctgtatacggcaacttgaaacttatgagaaagacgctcagcgctgaacaatatgctaaatatgccgctctgatgaaccttactttactgaataaaggcatcgacctaagtaagtaaaattgaatcatatagcaagagaaagggtggagaccggtcaagttctccacccttctttttatctcatcccacctgccggactttattccggcaaatacattttcagcatcatttacaagtacaccagaatcatttgatagtcaccatggtagccccgaaaccatattcctgaaaagaggcatcctgataacggtaattgctgtgtttccgtttcaattcatcaataatggctttccgaagcactccgtctccttttccgtgaataaacacaattttctgctcacgcttctctttattcgcctctatcacttcacggaatttgtccagttggtagttcagaatttcgctgttactcattccgtgcgtatcatcaagcagggaatcaatatgaaggtctacttcaataatcccattttttccgctctgaccgtggttgggcttcacaataggttgcgacttgggtttatccacaaactttttctgcaacaaagctgactgaatctcttccgccgacacatatacctgcttggcaggcacgtcatctttcacaatatcataaatcagagcaggttcttcgaagaaatcggaagcactgaatgtatgcagtttatagaatttcaccgtatcaatcctcagctctacgctgacagcaggtttgatggcggcaggctttccatccttgaaagcgatcagctggacagctacccgctccatttcattcaatacatccttggtgaattcttccagtaacagtttggtattcggctctaccagtccatgtgaacggttgttccaagcctttccttccgcactcagataagtataatacagatagtaattgctgtcattcaccaaatatgcctcgaaaggagtagtcatcatcgctttggcatcttcgggcacataagccaaaaacacattcaacgtatcaccgccacgcacttccggctggcgctgtataaccggcatttccggtttgaccggcttcgcggggtcctcctgcttcggagctgtcgcggcaggcttgcgttttatattgtaatcatccgcctcaatcacgacacattcacgtatcggcatcgggatatcaaaaccatccgcatcttccaccagtacaaagtcttttcctttgaatcctgttacgattccaccgcctacctcactgaggaaacgcaccttatctcctattttcattattgtatctcctattaaaattcaaacttaaaacgggtaacaaagatagggatttatatgaaaatacagtaactttgccgcaaaatataacggaacgattctcgtcccccattaacgacaagaccgatgaaagaacttattaaagtcatagcttttgatgcagacgacacgctgtggagtaacgaacctttttttcaggaagtggaaaaacagtatacggatttgctgaaaccgtatggcacctccaaagaaatctcagccgccttattccaaacagaaatgaataatctgcaaattttgggatatggcgccaaggcgtttaccatttcaatggtcgaaacagcattacagatcagcaacggaaagattgcagccgacattattcggcaaattgttgatttagggaaatccttgttgaaaatgcctatcgaattactgccgggagtcaaggaaacgctgaaaacgctgaaagaaacgggaaaatacaagttggtagtagctacaaagggagatttgctggaccaggagaataagctggaacgttcgggattatctccttactttgaccatatcgaggtgatgtccgacaagacggaaaaagaatatctccggctattgagtattctgcaaataactccttccgaacttttgatggtcggcaattcttttaaatcggatattcagccggtcttatctttaggtggatacggagtacatattccttttgaagtcatgtggaagcatgaagtaacggaaacgttcgcacacgaacgcttgaaacaggtgaaaagactcgatgatctgctatctttacttggggatattcagtaaatgtccctctttctaataaattaagagaacagttttactttacgtgagcttttctcttattttttttctgtaaagtctcaagttttctatctttttcatagaatattatttacatattcttattttttcttcccaacgttacattatgtatatgtctttttaggggaagttaaaaacctctcctgttttcctcttattattttagtctgattatgcagccgttctttttttcttttcgaccttttctatcatgcataccgcattggccgtatgtattccaaagaaaatccaaagcatttccgttttcctgtttctagcttttattctggccagtgagtaatgttgtttctgcgttccaaagcttccttccagccgggtagctctttcacggctgagttccgaccgtaagatcttccgaagtggctcatctttggcagctctgcccttacgcttaaaggaagtacttatatgatatttagtacaaaatttccggttggcattattagcatagattgaatccgctgcaagcgccttaaccctaaccttggtcagttgttgttgcagatgaatacagtctttcaaacgtactccttcgttaaaagccttaaaggagatatgttctataaacgagattccatctatctgtatattgttgactttggctccgaattcaacggatttggtttccttgcctctgataatggggcgaaggtaatgccggtcgatactcacgatacggttggacacttttttgcctgcaaataaattcttcccttgctcaaggaccgtctgtatgaccgagaaacgtctttggtaatcagaggatagtgtaagcctattcctgtaggatgaatgaatctgctccagctggtccagtaacttttccaataactgaagtagcctgcgtgtaatcatacgggtctgtgatttccttcgtttacgcagtttactgtaagcaaggtaggcacggcttacatcaagatacttattacggggacgttgtatgtgcaatctccggcaatgtttgcacagatgacgatgaagccatacaataccttcccataagagtttgacatcagtagggaaacgcagatggctttcataacaggtggcatccgtcatacagacatgaaggttctcaagataaggtttccaatggtcagccagaatagcctggagggactcaatatcaaggcgatccgctagttcctgacgaattgcactgacgattttaggattgggcagtggatgaagcggatcaatctgaacaccacaaaataactggtaatgaatattcccgtttaaatgttcaatcagttgtgaatctgaaaagttggtataggacttaaggaccatcaaggctattttaccctcaggagaaaaataacttttacgacccaaagcagaggacttcaaatgcatttcccgggccagttccgagaaaggaaacagagcatggaggcgacctaattcactcgttgcaaaactttgacgatatttttttagcatatcgaactcagtaaaacctaaacgaggttcgatttctgagattttttgtatctttaccatgtgtttttagtttagattaccccagttttggccgtcaaaccgttttttggggggaatgcttaaagatacaaaaaaggcaactaactcgcaatgaattagttgccttaaattttattattttaggaatatccctacttggataaatactctatctggataaatcccggataaattcaaggaatattacagctatttcatcagctccgctgcccgacaggcttctatcgagttgccgacagaaagtttttccaaaatattctgtcggtggcggttgactgtattcacactgatataaagagtcgcggcaatttctttactcgacagccctttccgtatgcagcgcagtatttccttttcgcgttctgaaaggatattgcggtgctcttccgaaagggataatgtttctacttccccacgttccatctgggttatcgtagcataaatgccttgttccggccgttggtcggcagataaggaataaaggcagaagatcagccagacattgccggcaggggtgttctgcatgatttgcacaaggttgtcaatgtattgataaacgcctttttcattcatcatacgcagtctgcatctgccccgatatttcagccgttcgccgggagacatggaaaaagtcttctggaaaaacttgtattccatcaaacgcttttctaccaaatcttccggatgaatgcgccggtagatacaatcttcgtccatcgaatcaattacgcttaaagccgcctcttcgggagtaagtcccaggaaattcgcccacggatggacagtaacgtaacttttccggttcgaaagatcggaaatgacagcacaccctccattaacttccgtcaatgagcggacaaactgctggtgttgttccactattccattatccagtgcttcgtgcgctgtcggatgcgtagcatagacttcatcaatttctttttgtagtacgtccatcgtataaaatggttattattcagtattgtcgcaaggacaggcatgacctatctttgcaccacaaagataaataaataagaaacgaacatgaaacatttaaaaatcaaaatcatgtcaatcgcgttattggcggcagcaacttcttctatggcacaaagtctgaacaaaatgaactggctgaatgagcctcagcaatgggaaataaaagaaggcaaggctttagtgatggacgttccggcgaaaaccgatttctggcggatttcccactacggatttacggtagacgacggacctttctactatgctacttatggcggagagtttgaggtgaaagtgaaaataaccggcaattatgtgactactttcgaccaaatgggattgatgttacgcatcgaccacgagaactggataaaggcaggggtagagtacgtagacggcaaacagaatgtaagtgccgtagtcacccactgcaccagcgactggagtgtagtgcaactgccggatgctcctcgttctttatggattaaagcggtccgccgactggatgcagtggagattttcttctcccgcgatgataaggaatatacgatgatgcgtacttgctggttgcaggataattgtccggttatggtcggattaatgggagcctgcccggacggaaagggattcacggccacattcgaagaatttaaggtaactcctttggcagatcagcggagactggaatgggctaaaaaacaagccggcaaataaagaaagacagttcttccaacaagctcccttagatggcggagcaaaatgatggtacacaatcacacttcgcggacagtcttgttgagccaatcaatagcgattcactcagaacaattaccctttagggagatatatggctaaacaagtattccatcagccaaaatgatcgtcattcttggctattttcttccgttgcacctaggtacaacaattgtctcaccttggttaaacaactgaagcacctaggtgactctttcgtctcacctaggtgcaacgaaaaaaaatcgctatttatgtgattaatgagtaactatcgtcggctaatggatagtaacagaacccggttccatatcctaacggaactttccactaaacactcccactttaccagtgtcccatcaagctattttcccaaaaaacgggcaaacttctgccgctcccgttccaacgtttcttcatccatatcggccacctgtctgaaccatgaatatttcaggtcgacacttttcttcttttccgatttatcccagtttcctatgacctgaccgttatgaaggacaatcggaaagaacagtccgttgttagtaaacgctttgggataatgttcaaggggcagaacatccgtccggtctttatatcccagcagatattcatcataggagggcaaaagatgtatatgtcccgacagtttgccacgagtccggcaggtgtcatgaatataccatgtctgttctttccattgttcggttgtcagttccgaagcaatcagataaacagcctgttttgcatccgaaaccggcagccccgaccaccaaatgaaatcctgcaaaactgccggagaatggctacggaaataactccgtgccaagcgcgccaaagactcgtctttcgtcagttcgggcatcggcggaacccgttcttccaaaagtgcgtacgtgcatttgcttcctctgtcctcgccactacaaatgatgccttcctgctccgcacgtgccataaagcgagtcatacggtgattgtccgccacaatccccgaacggttaaagtgttcggcaatctcttgttttgtcatgcttttctttccacaaagaatcttctccaacaggtcatgcgctttcgtatagagttcatttgggatgtccagatcatatcctttcgcaaaagaatcatttgccgaaataatacgttgcgcggaaagtttcagcatccagcggatatcctctgccgccaccagatgccacgtaggacgcatcacatgagtcctcagaatttctccttcatgcaacgccttctctactgcctgaattgtagccgatttcagacgcatccctactgcccacttcaccatggaatagttctgtgcctgcatggctcccatccaggataccaactctttaggttcacgaaaaagtggatttaataactgctgattcagcaaacggatattcggtatattcataaattagttattttatttgccacaaatataaagtttcttcgcaaactattcattataaactgttaattgataaaccaaatatcagcagaaacatcggtacagatattatttcaactctctcgataagagtcagaagctgttggaagtctccgaataaatctctacttttgtactccataacaaagaatatacttagaatgatgctctataaacttatttccccttccatggtaaaggcaacaatccagttgccagcttccaaaagtatcagcaaccgtgcactcatcatcaatgcgctgggtaaaggcatttatccgccggaaaacctgtccgattgcgatgatacccaagtcatgataaaagccctgaccgaaggtaaagagactatagacatcatggcagccggaaccgccatgcgtttcctgaccgcttatctgagtgccacttcgggagaacggattatcacaggcaccgcccgtatgcagcaacgcccgatacagattctggtcaacgctcttcgcgagttgggagctgaaatagattacacccataacgaaggatatccgcctcttcgcatcaagggcgcagagctgaaaggaaatgaaatcacgctgaagggaaacgtcagttcacagtatatatccgccctgctgatgataggtcctgtgctcaaagacggactgacactgcacttgacaggagaaatcatttcccgtccttatatcaatctgacactgcaattaatgcaggacttcggagcaaaagcggcatggacttcacccagcagcatctccgtagctccgcaaccgtatcagagtgtccccttcaccgtagaaagcgactggagcgctgcttcttactggtatcagattgccgctttgtctccggaagcagagattgaactgttgggattattccgcaacagttatcagggagacagtcggggagcggaagttttctcccgtctggggatcacgacggagttcactccccaaggcataaagatcaaaaaaacaggcaaggcaccggaacgactggaagaagacttcgttgacattccggacttggcacagacgttcgttgtaacttgcgctttattaaatatccctttccgcttcacaggcttgcaaagtctgaaaataaaggaaacagaccgcatcgccgcattgagaaccgaacttaaaaagctgggatacctcatcgaagaagaaaatgacagcgtattgatgtggaacggcgaacgttgcgaaccggaagcggttcctgtgattgcgacctacgaagaccaccggatggcgatggcattcgcaccggcagtaacctcttgtcccaacttactgattgctgacccgcaagttgtttccaaatcgtatcccggttattgggaggatttaaaacttgccggattccaagtgataaacgaaggttaatcatagccgcactgtggaagatttcaataaatatacttcccatatcaactattcccctattgtagattttacattacagcaggggaaagagactttttataaaaaaggagagtactttgtacggcaaggagaagcctgtaagatcatggggtttgttgtttccggctctttccgctattgttgcgtcaacagtctgggcgaaagcagcattgtcggatatacattcgaccattcttttgtcgggaattatccggctttccagttgcaggaccaatcaaatgtagatattcaagcgttatgcgactgtacggtgtatgtgatcaaccattcccaactggcagatttctacgacattaacaacgaccaccaaaaactgggacgccggattgcggaaactcttctgtgggaaatctatgaccggatgatttccatgtacagtctgacaccggaagaacgttatctggatattatcaaccgctgtcccgacctgctgaaactgattactttaaaagaactcgcctcttatctacttattcgtccggaaacattgagccgcatccggagaaaagtagttcagaagtaaattcttgattgaaatcaagaatttattcaggctcctctcctacctttgcaggcaaacatagtctattttaattcatgaagaaaataataattgtaggcgcaacctccggcatcggtcgtggattgtcagaacagtatgcccatgaagactgccttatcggcatcaccggtcgccgtgagaatctattaaaagagatttgcgcacaagataaagataaactattctatcaggtatgtgacatcactcacacagaaacgaccctttcatcgctggaaacgcttgtacaagaaatgggaggcatggatatgctgattatctgtgccggaacgggggaactgaatccgcagctctcctatcagctcgaagaaccgaccttattgaccaacgtagtgggatttaccaatatcgccgactgggggttccggtactttgaacagcagaaaggcgggcatctgattaacatttcctcagtaggcggaacacgcggcagcggtgtagcaccagcttataatgcttcaaaagcctatcaaatcaattacatggagggactgcggcaaaaggcggcaaagctaccctttgctgtctacaccactgacatccgtccgggatttgtagatacagcgatggcgaaaggagaaggattgttttgggttactcctgtcgataaagccgtaaaacaaatcaaaaaggctatatcagacaggaaaaaagtcgcctttatctccaaaagatggaaatatgtggcatggttattcaaactgattccttccgccctttattgcaagatgtaaaacagcctttcagtgaggctgagttaccatgaagcttcattggccatcttccacatattaagaaaagaagccttggtgatttccactatcttatcccagtttaaccgatcagcatgatcggatggctggtgataatcgggatgtccgtccgtatgataccagataataggaatacctgctttggcaaacgttccattgtcgctgccccctaccggattatcccaggcacgatagtccggttccaactgtaaaccatacttcttaatatcctttttcagccagtctccaaaagaaggatgagcagctgtatagaaatagacgacatgtttcggttgttccggtttattgttgcgacctatcatatcaaagttgagatatcccttgatctgcgaaacaaaagggcaagtctgtacaaaatatttagaaccgagcaatcccttttcttctccgtcccaaaaggcaaagattacatttcgctccggttgttgtccgcttgcaagaaatgcccgggcaatctgcaatacagccgagacaccggaagcgttgtcatccgctccattataaatctgatctccgtcaagtgccgggtctatccccaaatggtcaaagtgagcgcctacgatgacatattccttcgtattcttaccgggaatcatagccagtacgttcctcatagatagtttttgatgaacttcctgtttcagcttcgctacagagtccggatgaacttccagacgtcctttcttctgacgctctttgcggtaagcatcaaaagactggaagtagctttcgttcagaggttggattcccatccattgtaaaatagatgctatatactcagaggagacatacgaaccgtggaacccggcttcacgtccctgtaattcattacttgcaaggaaaccgattgttgcttcggcagaagaacggttgatcgtgttcaagcctttttctacgggagactgtgcaaaagttactgttcctacaagtattaatccgaataatataattctttgtttcatcgtggtatataatttagagtccatgttacaaaagtacaaaaagaacacagaatctatccttaaatacaaaaaaagagtaagcagttgccatcttttataagatttggctgctcactctttctacaaactattaagaccttgttatcctgtcaatctttccttattttgaaaaaggagacatgcggaaagcatatttataaactgtattcttctgaatttcataagcgggacggggacccggtccgcaactggcattacccagaccacgctgtatgcaatccagattcagcaccacctccgcacgataaatatcaggcaaggcatgaccgtacttgatttcaaacaagtccttatccgtatagtgcaaagcactgaaatcaaatgtatcggcagcagtaatcttgattcctttacctgctttattggtcaaagtcagccagcgggtatcacaacgcccacccatcgtctgagaacgggcataactctctttcatatcattgacagcagactggtatttgccgacataagccgcattcttccgatcccgataattttctatcggaccgcgaccataccattccaactgctccaacgaaggattaaagaaggcctgtaacgacagacggggaagattaaagtcatcattcgttgtaaaagaagcatccacatctatttcaccattaccatacaaacggtaaatcaatgtataaggcactttcacatctccgacggtttcctgcaactgaatcgttacaattgccgactgattatcttccgagcatttccagtcgaaactgattacctccgtttgggtatcctgccatttacgcacatcgttattgataaaacggaacgtattcagcgaccatccttcacgcagatgaagcatattatcgccattataacggataccggtcaacttgccttctttcttatcaaaggtgatttctacaccgggacggcggaagaacaaataacgcttctcctcttccaccaccttaaacagagattctttagatgaggcggaaactgctaccggctgtagcccggtattcggggatttttgaagcaaaagttgttccgtagctacgatatgtccggcttttgcccatacgcaatccttctttagttttatttcaaggttcaaataatattcaccttctgaagttaaatagcgggaataaggtatctgcaccgcacgatgctctccaggcttaccatcgggtaggctgaactcttcttccgctatcggcacaccatctttcaaaatcacatagcgcagattaaaatcatgcagattcaggaaagcatagcggttacgaacgccgatactgttttcagcattcggttccaatgtgatatattggtagactttcttcacttcccacaacttaggagtaacttgacgatcagccgtcacaatcccgttacaacagaaatcattgtcgttagggcgatcaccgaagctgcctccaaaataataatgatcggcaggctgtccgggcatattaatgccctgatccacccaatcccagatacatcctccgatcatacgtttcgaatgatgctcaatataatcccagtattcttccaaattaccgatggcgttgcccatcgcatgagcatattcacaaaggaaataaggcttgttacggggttgctcgtcctgttcgatcatactttcaatcgaaggatacatacgggaatccatatcggccacatcgttcattccttcataatggatataacggtcgtctatcgctttggctgcctgataggtagcctcaaagttacgaccaccaccggactcattgcccattgaccagaaaatgaccgaaggatgattcttatcccgttccaccatacgcaccattcggtcgacgtaagctccttcccaactttcacggtttgacagcgacatattgccgtgacactcaatatcggcctcatccatgacgtacaagccataataatcatacagcgcatacatcttcggatcgttcggataatgactggtacgaatcgtgttgagattgaaacgcttaaagagaagaatgtcctctatcatgctttccaccggaacagcttttccaaactgcggatgtatgtcatgccgattggctcctttaaaaaggatcaatgcattgttgatatacaccttattattccggatctctatcttacggaagccatattgctggctcgtcgcttcaagcacattgcctgcggcatcaagcagttccagttggacggtatacagagaaggagtctcagcactccataaccgagggtcacgaatcgtagtcgtaccttcacagacgttttcctgtccaccagttatcttaccggtaggtatgataaacgaactcacaggctttccttccgtattcagcaaagagacacgtacggtagcttcctgtactttctttccgtaattatgcacatccgttttcactttcagttccgctttatccagacggtcgctgatctgagaagtcaggtgaatgtcacgtagacgaactttcggactggctaccaaataaacatcccgatgaataccacttaaacggaacatatcctgatcttcaaggaaactgccgtcacaccagcggtaaacttccacggcaaccgtattattacccgctttgacgtaaggagtgatacgaaattctgcatcattactggacccttgcgaataaccgactttcttaccgttgatccatacataagctgcactataaattccatcgaaatggataaagacttctttgtctttccagtcggcaggaagagcaaattcacggcgataagatcctaccgcattcggctctttctctacagtatatccacgctgcccctgtataaaaggaggattgttacggatgggataagtaatattggtataaataggtgtaccatatccgtgcatctcccagttggagggaacaggaatctctttccagccagagacatcataactcgttttatagaaatccaccggacgttccgaaggttgtttcacccagttaaacttccagtttccattcaacagcagataacgggaagagcgggtacgctcccaaggacgggtataagcgggatccgccttcatctcttccgaattggcgaaaggaataaatgtagccctgccttcttctttattgattgcatagatacgttcattttcccagtcattatgactcgttgttttcaaggcttccgccactactttcaggttcgatttccgtatctgccactgctggttacttttcgaagcttccggttctaactgaaagacaggctctccgaccagtccggcatcaggaaatcctaagttatagccagtcccgacattggttaatacgtaattcccattcggcaaagccgttattttccattgctgattcggatttttagggtctgccgaccattgaatcacggaacattctacttttcctttaccactattatctacattcatttgagtcaagggactggttatcgtatagcatccctcttgttcgcatggaatcaggttccagacctgcgattctttgtctgcctcctgcttactgataaatattttcgtattcgtatccagactctcctgattgtccagcactaatccgttgaccgtatggatttcatatccttgcttcggatcaaactgctgcgccacaaccgcagaggcggaaaacgacagtgcaatcaatgcacttcccaagatttttaatcgttgcatcatttagtagtctaatttatattataatttgaaaaccggtgactgtttatatacgccaaaagtatggatagccggacaagccttaccgtcctgaatacgcaaacgtacctgctttgctttcaccggtgccagacgtacaatccatttatgaccaatggcctgcttgtccgtcgcctccggaatggtgatccagtttttgccatcaacagtgtactccacactccacttcgtcgtccgatgtcccaattcgataacttcttcgatcatcagacaatcaaactcaatagttttgggcaaggtaaaaattatatccgcttttacctctccgtcttttccggcaaaataagtgtttttctcattgtccagcattttttccggactatactttgcaccccgtacattggtcgctttcactttggctcctctcaacagattcgtactgaaagtctcatcaatcccctgttttaacaaggcggcgtgcagcgaatcggtcgaatgaatcaaaccacgtctgtcgggcgggaaattcagaagcaatacactattacgccccacggaggtacagtagatatcccaaagttcacggacactcttcacacggctatcctcttcggcatgatagaaccagctgggacgtattgaaacatctgtttctgccggaatatacgcatcaccatccagcataccctcattcaaacctttgtaatactgagcttcatcacgaatagctactgagtcagtcgtcgcccaacaaggatcacccgcttctcccgcttcattccccatccagcggacatcagcaaacggataagaattctttgtaccgaagataacgcaatccggctgtttttcacggacaatcttataccaatgacgataaacaggcgttgtcaattcgtcggctcccgcgccgtcccaccatgtttcccatatcttaccgtaatcactcatcagttcgccaagctggtgggcataatattccttgtagcgttcggtcgtatataaaggtgaaaggtgttcgtgacggtcatgaggtcccagatagattcctgccttcaatccatactcttcacaagcatcgacaaactcgcggactacatctcctttaccgttcttccacgctgcattcttcacactataatctgtgtacttgctaggccacaagcaaaatccgtcggcatgcttggcagtcagaatagcagcgggaatccccgctgcttttaatgtctgcatccactgcctgcaatccagggctgtgggattgaaaattgccgtacttgccttcccgtcaccttcattcacatattcttcaaatgtattgattccaaaatgaaagaaagcaatcatctcccgattgtaccattcaagttgacgggcactcggaaccaacccgcaaggagctggtgcttgttgagctatgaccggcagagaactgaatgcagcaactgccgatgcaactaatacttttatgttcataataaataacttacgagtatattcgtttatttaggacccagattttgtttcaccagctgcacgaattgatcgaccggaacaacacgcacattgtcattcaatccatcaatgacggttttgatactttgctggttctttgtccagcaatgtacaaatacaaaagtatatccgtcggcactatgcggattggcagagcggctattgatctgagaaatgacagtcgattcttcacctctgttcgagccaccgtcgatgccttcccataatacgcttctctgctcaatcaccggcttgccattatccgaaaatttgattcttccatcccctttttctccatatcctgtgtagaaaatcgcatcgatattaggctgagccagatacttattgtaaactttcggattatccataatcttctgatccagaatattacagatattcaagcctgacttatcgacatactcattcaacttagccagataatcgtccaggtcggcatccgacatcttactcgggaatatatagctgctgccactcggacccgctacaaagtaatcgccttctttgctattctcatagtaccagcgtaaagcagccggagccaaatcgtacagagaaggtgaaatggtatatccgagtgggaattgaccgtgcaggtcatgatccatgtatccttgttgcccccaaaggttaaacgcaatattatcaccgtcactgacgaggaatgtcacatagtgcacattctcttcggtaaccacttctttagttgccggacgctgtttcagtcctgttgtatcatatatactactcaacgtggccagattagccgcctgatcggtcggcaacatagaaacacccaattgagaagcattattcaccatgccccattcatccagatcataataaccgaaacaataagctcctttatccagatctttcagtatagaagtacgccatgaccaatccctgcgcgcattgtagtcataaaaagcaaaagcattggtcattgtgatataatcgcgcaggtgatggaagatttccggtttcatatcggctgcaagactcttgtccaactggtctttataattctcgtacaaccacttctcatcataagaccttacgtccataagttcggttgtcactcccattgcctttaccttatcgacaagagattccggtaccgcaatcccccgaagcaacccacataaagaagtagctacattgatcgaatgagattgtccttccgaataaggcgtatagacaatataccccttgatcactccggtttctacataatgctgtaccaacggagccaaagcattataagtatttaccggaattccgtacttattctgcatctgcttcaaccatacggaagaaggacctccttcattgatataaacctgatcgcccgtcactcttgccgcaagccctgccaaagtggaaagaattactttctcgccatcattcagtcctgtgatggaaatagaattcagggatttcagttcacgacctttcagatgcataaatcccctgtccagcggttctgccggatctatcagcccatcacccggttcttcacccggacctcccggattctcggtagacggagtatatttaggaacgaccacacctgccgtcggatcttccatacaggagattaacagacagaacgtcaaaagtatataaatgtattttttcatggtaatcgttttttctgttatttaataatagaaatcgcattaatctctgctaccgctgttgcccatttgccactatacacggcagttattgtcagacggaaataacgtgcctgcttaaatcccggaaaataggaacggaattcctcttttgcccccgcaggaaggtcgctgtaagttcctgccgactcccacttcgagccatccagactggtttccatcgtcatctcctgcggccatgcttcaccatgatctctggatacatactgaaagcccagcattttcacttcctgccccatatctactacgatatgatgtggtggctgaggctcgttgcctttccattgtgtatgccagaaagttcctttcagtccgtcaaaagcgtggatagcgtgaccgttatccgacccttcgccgctcgtctcttccgaagaaacttctactacctgccatgcactgcggtcggccaatggcatcgcccatacatcctccgcaccactcaaaaggtaatatactgtctgctgaatatgatccgcctgcgcaccttctaccgaagtgatagtgaccggcaacaaataagaatcaaacggctggatttttccctgtgcatttaccgtaagcaccagatcggcagaagaactctccccggccggaatcacagtttctgttgtcagcgtatagcaatcggaaggaagcaaaggatagtctgtcccacacaaagaattatactcctgcaccttcgcctcatccacagtcaactgtacctttacatctcctcccacttccttaccggaacgggtcacatagtcactggcagtcacagccacatgaaatacttctctcagttcttcacccaaatcgaagtttttaatctgcaaagttttggcttccggaatatatactttacaaacatcatcatcactacatccactcagcaaggcaaacgaacaaagtaccgcacttgccgccatgacaaatctatttagtttcatacgaataatctttcaaggtttacattctttattaatatccgggattctgcccgtttacccatccgtcttcaccaccattttgctcgcggatcaccggattcttgtctatcacatactgcggaatgggctgataatacatacgtggcaggaaggtacgtttaccaacttcatgataattgtattcccacacaccatctccattggtatcttctattttcataccgccaatcggtttattcatcactccgttttcaccatcacaaatcttccagcgaagaatgtcccaccaacgcttatcttcaaacgccagttctatgcgacgatctctccgaatgatttcccgcaactgattctctgtgattccctgcggataagtatcgttgatagaaggcatattatctccacgtgttctcaccatatccaaatattcgatggcagtcggtttatctccggcttccaaagaagcttctgcatacatcagcaacacatctgcataacggaagaaaatataatttgccattccgttgctcatttgcagattgtccgctccattcacggattcgtcaatcgtcttacgagtatagtatcccgtattcgtaacgtcactatccgaagaagtatcaatctcattgggactacctacgcctacacgagtgataatctcttccccctgccacatggatccgtcatacaggatgctctggtagaagcgtttctcacgatttttataaggattattcttattgtaaccggatgcagggtcagtgataggcaatccgtttgccatgcaatagtcgtcaaccagttcctgtgtaggctgcatatttccccaactggactgtactccttttacaaacaccggaccgaacaggccttcacgacgcccgccattctgcttagacatctggaagtcgaagatcacttcatcgttattgttggtagcttctgtccaaaggtcaagaatagtcggttgcagacgatagacctgcaagtcaattacatctttcaaggtagccgcagctgcttcccagcgtttcttgtctttgcccggattacgcaattcactggcatggaacagttccacccatcctttcagcgtcagaattgctcctttggaagcacgtcccagatcggaaccgctacgacgtggaggaagatcatctttaatctcgtccaactctttgtcgataaactcaaatgttttctgtgcagtctcacgcggataaaagatatccgtactcacgttattatccagcacttccgtaatgataggcacaccaccgtacgccatccagagataatgatagaaccaggcacgcaagaaacgcgcttctgcaagacgttctttcttataatctgccgagaaatcggattctgttacttttgtaatgaacagattacaggagcggatacgttcatactgtcctttggcgtcgtcattgttctgacgtccccatttccacatatcccaagggccgggtatccaactggtaggagataatgctccggtataaatcgttgtacgggcattcatccattccgcacctacgtatgaattatccgaatattgatccagattctgtgtttcattgttcagatgcggcaactgattatagatatcattcagaaacatatcggcattttcttccgatccccaaaccgttgtatctccaaaacggtctttcggctctatttcaagccagtcttcacaggcagacaacaaggctaatgagcctgccaggcaaactgtttttattatattatgtattctcatattctatcttgttatgatggttaactaattaaaaagtaatattcaaaccaaaagcatatacagcctgctgcatatagtatttaccattagcggatttagcttccgggtcaatcaattctttcataaacggagtccatgtccagaggttttgtccggaagcatatacacgggcagagctgataccaataaagttcagtgccgaacgaggcaaggtataaccgatttcaatactcttcaaacggatataagtagcatcacgtacccaccacgaagaaggttgacgatggttattcaccgttacttcactggtcagacggggataaggtgcgttcgtgttatccggcgtccagtgatcactgaattgtaacttagtagccgaaccggaatcaaagaaaggcattaccaaagtctcccccaatgaaatgctggtacgggtagccccttgaatcaatgcgttcaggtcgaagttcttccattggacagtaggagccagaccgaaaataatttcgggcgcccagttagagaagccgatcactgtctggtcgtgttcgtcaatctttccatcaggcacgccgttaggaccgcttaaatcttcgtagcgcaaatcacccggatatacctgtccccaaggttgagtagcgatgccggcctttaaggaaccgtcaggattgaagtcgtcataagtaaagtaccccaaagcattgtatccgaacattgttccgtcgggacgtcctgttctgcgacgattcggattattaaaggtggcttccgtctcaaatacttcatccagaatattacgtgcgaaagtgaaagtaccttttgcactgatcatccagtctttgccgatacgtttgttgaaattcagagataaatcaataccttgattgtgcatacttcccgcattgacctgtgacaaaggaataccatattctgccggaaccaatgcattcggagccatcagcatattcgaacgcttctcatagaaatagtcagcttccaaagaaagcataccgttcaatacggaaaattccacaccgaagtcaaacttcttggctttttcccaagtgatgttcggatttccctgtaagttttcccacatacccatcataggtatgccgccaagatttacagcatttccaaatccataatcactcatatattgataagaactaccagccaagtttccggactcaccataagaaaggcgtaatttcagtttatccatccattcgatgtccttcataaaagattcttcccgcaagttccatcccagtgagaaagcagggaagaaaccaaaacgtttgcctggagcaaaatagtagtgtccgtcataacgaccggaaacttccgccatataacggttatcataattatatcccaaacggaatgcataacctacctgacgttctttccaagacgtaccgccgttgctgatatcggcagggtcactgcttcccgcattgatttcatctatgttaatattataattcagacgtttggcactcatattccatacgtttctttcgcgtgcttcaataactccgagtccggtaaccgtatgcttgccgaaagtccgtgagtaattaatcattccctgataagtcatgctcacgctttcttcaaacgattgttccagattcggtttctccggtccctggaatccttccacgaattgatacggagtttgtgatgcatccagtgtgtatacaggtatcggtgtcagatatttctttttcttcacacgatacgggtcgtagttgattactcctttgatgcttaacccttgaatgaagggaagctgttgctctatggagagagaagtattcagttggtcggccggctcctgacgatatccgctacgataggtcagcccgaaaagtgacttacctacatattgtccccacagaccattcgagtactgtatagcagagataggaggtgtacgatatgcctgatacatgatgtcgcctgtatcggcacccggataattcttcttttcgtgccatccacccagacttaaactgattttcgtatatttggtggcatccacgcttaaattagccagcagattaaaacgctggtaatcggtagtactccacattccttcctgataagaatatcctaaagatacgtagtactggaatttatcgctaccaccggataattgcaagttgtgattcgtaatcacagaattgttttgtaccaagtcacgcagaccgttgctattaggataacggtcaggatcggcatcggggtctccggcacaggttttccggtacatttccagatcatgctgtgagtaggcataataattgggataacctgcattcatagccgcttcgtttttcatcaaagcatattcatacgaattaacctggtcagtgatgcgggtcgggttctgaaaaccgatatatccattgtatgaaagtaccggagcaccgctttttcccttttttgttgttaccaatactaccccattggcaccggccataccataaggagctacggcagccgcatctttcaggatagtaatatcctcgatcatattcggatcgatacgtgaaaagtcacggggaactccatccactacgaccaatggagattggttccctaatgtagccacaccacggattctcaaatcagaaccatcagctcccggttctcccgatccttgttttgcaatgactcccgccatacgacctgccaaactattagaaatattgataaccggcttttgcgctacatctttagtcttcatgcttgatacagcagctgtagaagaaatcttcttctgcgtaccgtaagccacaaccactacttcttccagaatttcagaatcttcttccatcacaatctgaatggcattctgattgttcaccggaatattctttgtggaaaaacccacatacgtaaccgctaataccgaattggaaggcaaggataacgtgaatttaccatcgatatctgtgatcgtaccattggaagcacttccctgctccatgatgttagctccgataataggctcgccacttttgtctactacggttcctttgactattatttttttacctattgattttttctctacctgcgttttcttcaatgagatgtagttgtcggcgtattcatacgtcagccctatttgcggcaatacattttcaagcaatgcttttacctgtttattccgggcattgatttttactttctgttcgatattgatgtcttttccgtagacaaacaaatatccggcctgtttttcgacttcgtgaatcagttcttttagcgaaaccgaagttttattaatattcacaactgctgtctgtgcctgggcctggtatgtaaaaaggttaataaacaggaccaaagcgagcagtgaaaagatttttttcataactttgctaagtgattttgttagtactttattttaggttcacaaaaacgtgaaacagagaaagtattaatagctgaggaattggggagagtgttgcatcactttccccctttttattcctcattttgatgtctatttactttcgttttattctactccgttgtgttacataggcattaaattttaatcagattattaatatatcgttatctctcgctgtgacagtattttgtactcaaataagtccgcacggctaattgctttcagaatcgtttcaatctgatcgctttgccggaacttacccgaaataatcttactcaacagagatggatcatctacagtaaaatgaatatcataccattgctccaatctttccagcacttcgcccaacggtaattcttcaaagtcataaattccttgttcacgatattcctttcctccaaaatgagaggaagactttaccagttttccatctaccaaagatactttctcgtcaggcaataaattcaccgattcttctggaaatccggtagagctaaccctcactttacccgagagcaagtctgtctcaaacttctcactgttactataagcatacacattaaattccgtaccaagcactcttacatcatacttctgcgtctgcactgtaaaaggacgggaagcatcctttgtcacagtgaaaaacccctctccatccagttctaccgtacgggcatcggacgaaaaaacagaaggccacttcaacgtagaaagcgaactcaaccatgcctcactaccatctggaagggttaaatgtacccgttgccctttcggaactgtaatctccgtataagaaggagtctccgagccaacaaacatataccaggcgagcatccacgtcagagcaatcatagcggctgccgaagtagtataccgcacgatttgcaacacccgtttccgcctcagctttttctcctgacggttcatcattgcttccagattccgttcgcctttcaaagaatcatcttctctgggtaataatccggacagacctacgatattttgcatttctgcaaattcccgtttcatatcttcgttcttttccagttcctgaaaaagctcccgtttttcctcttcggtcggttctccgaaaaagtattgattccatttctcattcatcatattgcgcgcttttaataagaagacacagcaacttacatttaccaccaaaggaaaatgaaaaaaaatcaaggaaaattttaatgggagaaaaatgcaattatcaaaaagaggggagttatcattccgacagagtgaaaaacagggcagtttcagattccgaataaaagcaataaaggcatacaatggcgtaattcttcccgaagtttcttcaaggcaatagccatttgaccttctaccgtattttgcgaaataccaagggattcggctatttcacgatatttcattcccttcagcttactcatgacaaatatttcccggcaacgttccggtaagttatcaattgcacggcagatctgtttttctacttcgtctatcgacatttgggaatcatcaagtagttgcaggctataaagtttcagtttaaactcctgctccataatatcagaaagcggctgcctgcggtctactatagaaagttgtgaacgaaggaagttcagacaacgatgcttgacagcggagaaaagatatgcatcgggctgttgcagttccggaagtatctctttacgttcccataaatagaggaaaaaatcttgtactatattctctgcgtctcccatagctcctacataaagggaagcgaaacgaaccaaacgggcatagtaggaaacataaagctttgagaaaagcttttgtgccgtcaagggttcggaagatggaagagaatgtatcataaacctcatattagatgcacaaaggtaacaaaagaaacagcaaagacaaagcctgactttaaattcctattgtatgaccgatacagatcaaatcaattaagattctctccgtatcggtcaatgaaaagtatactaaaacctattgaaactacttggaataagaatatgggaagtctgccggttgggtacctctttgctgattcggtacgctgtccattgacagattcagttctccgccctgtttcagttcatcatgcgtcagatagttgcgtgtgaattcttgtccattcaacagagctttccttatgtatggacggtctgccgcattatctgctgctgaaacgacgaagttttttccttcgggaagatgcagagttacctttttaaataacggagaacctaccgcatattcaggcattcccggacaaaccggatagaaacccatagcagaaaatacataccaagcagatgtctgcccgttgtcctcgtcgccacagtatcctttacttccggaattgtagagtttatccataacattacggagatggtactgtgttttccaaggctgaccgatataatcatacaagtaaatggcatgctgcaccggttgattgccatgcgcatattgtcccatgtttaaggcaaccatctcagctatttcgtggataacgaaaccataggttccataattataagtgttcggagccacaaacatagagtcgagacgggctaccatcggttcatgtccgcccatcagttcagataaaccttccggatcgtgaaatacgctccaagtccagtgccaggaacttccttctgtgaaaggaccgccccattccgtagcatcaaaacgatcacgccaattgcctttggcatccttagtccacataaaaccatgttccggataatacagattgcggtaattcttggctttctgataatactggtctgcgatatcctgtttacccagcgattgcgcaaagcgggcgatacaccagtcagcataagcatattcgagtgttttggctgtagcttcgggaacttccggataaggtacatagccgagcttatcataatactcgaagccgtcacgtcctacagaagctatttccgcgtggcgggcctgtgtctgatgaatcatcgcttccagagctttttcggcatctaccgtttgtatccccttcatccatgcatcgaccaataaggaaacagagttattgccaatcatgcaaccacgatgaccggggctcgcccattccggcataaaaccactttcatcataagcattaaggatagattgcgtcacgcgttccgaaacctccggataaagtaacgtgaacaacggatgaaccgcacggaacgtatcccagaaaccattatcggtatacatataaccatcatgcacgttaccgtcataaggactgtaataaacaggatttccttgtgaatcaaactcatagaactcacgcgggaaaagtaacgtacgatacaggcaggaatagaaggtacgaaattgttcgtctgttcctccttccgcttctacacgtccgagatagttattccactgttcacgggctttcccgctgatcaattgtacatccgcatcggctacttcacgattaaagttgatggcagcctgttcgggactgataaaagaagaggctgtacgtatggtcagtttttcacctgccggaacatcaaatttcagataggcacaggtataatcggccgctacatcggtttgatggtgcagcagagtatctccattgtaagtgccgtattctatgacgggatgactgaattccatcataaagtaattagcaaagttatccggtacacctccgttattatatcgtgtcgcaccttttaccaaccggttttccggttcaatcgttattgaacttcctccatgatatgcatccaccactacatactggtcttctttttcagggaaagagacttcgaatacagctccacgggaagtagcagaaagagaagtctgcaatccgttatcgaatgtaacactataattataaggagtcgctttctcctgttgatgtgagaaaggaaccagacgttctttatgacccattttcagttctccggcaagcggcataatggaaaaggtaccataatcattcatccaaggactaggctgatgtgtctgccggaagccgcgcatcagactatcggcatacgtatacatccatccactgccattctccccggtctgcgggctccagaaattcattccccaaggcactgccacagcaggataagtattaccatgcgaaaacgcaaaagtagattcggtacccatcagaggattcacgtagtctacaaactctactgtcttctttgactgctgacacgaggtgagcagaaaaggaagacagattgataagaaaaacaatcttgcaaccatatctattattatttgcttaagtttcacaagccttctgtatggctttctccttccacgtttgaaaagagaaagccatacagagagcctgtgaaactctagttaattaaaatacctcactcagatacttcttcgtctgttccggacgctggctcatacgcaaacgccataccagttcctgcatatttactacttcaaaactatcgttcagatggcctgcacaaagctttgccgctccggctccacgaatatctccagactggttctcaatcaggggatcttccgtctgtccgtgatcggagaaattactccatgcatgcacacatactacagaaaaactttcctgctgtgcttcctgtttcaatcttccggcaatataggcaggggtaccttcacgttccgcattccggtttccaaaattccacaaagagtatttcaccgtaatgaccgggatatcatatcctgctttattcgttacccaaataacgtctccttcacctcctgcataagggctatactgaagcgctacgataccttccaactggtcattggcatctacataagcctgaaatgcttctttggcagcttctgattttacattcatagccattacacccaacagtttcacacgatgttgacgcatatgcgccgaaaggcgttctgccacgactttcagattcttcgcccggtcgccattctcactataattgtctacgtaatagtaaccgcctcccagcatttccaaaatagagcaattcggcttttgctgactcaacagattatcgaattgtgccggtgccatcatcggaagcactgaagcagcaataccatacgtcatccgtacttcttccgactccgccgcattatagaaatctttaaagtcattcatcatccactggatattgtcaccatcggaaaggaagaaagaaacgaaattctttttctttgtataatccagaaactgcggattcttcacgcgggccaatgtcgatttctgacgttgagaataaagcaaagaagtcaaggagtgattgtaactccagtcacaagggatcatcggatgaccgctcttggaaaccaaatcaacaaaagcatcttcactgactccctgttcccatccgtagacaggtgcattcggttccaaccaggcaaggatttctttcagcaaagctgtgttttgtccggctatcgaagttccctgacgcttattcaagttcaatacgaaaagttcattcttaatggcaaactcacgcaattcaccggtttgtacaggcatgatcaccaaagctttgttgctgcatttatctttgaactccgcccatgcctgcgcagtagtcttgcttcttgcatcatatttcatggtatatcctgcttcttcataatattccttgtcacggacatccacaataatagaattataaacatgagaagcaacagatgctacgacaccactctccggattatgctcaatatccgtcaagacatatccgtcgaacattcctttcaactgaatagtcactccgtcggacggaccataatcattacgtgccagttccagtccgctctgcatcccctgttcgtggatacccatatcttcgagtgcctgcttagacagtttataggaatcactgccaccgtgatcgtgcagccaaacagctatttcacttgttccctgttctacggcacgattagccagaccggccaatgactgacacatcaggtggtactgcaatccgcgtactttctctgtttgtcccagctcattacggctgcctaccgttacaacttccacacaattccagtacttcttcggtttcaccttcatttccggcatatagtattgccccacattactgatcgggtcataagcatctgtataaagggacgtgttgttttcttcgttcaatccttgattgatttccggtgattcgtacacttcacaactagccattgtcaggctgagcaacagtgcagcgccacatatagtcgttttcataattacttctttcatttgttagttaaccattaatcaataaccttcattctgagataatccatctaccttgttccgttcatcttgtggaatgggtcgtaccagatggttcttgttcaaattatcatatttcaccacaaacggattgtatgcgggtacacgtgtcagcagtgtctgagtacgtttcaagtcaaaccagcggtcatgctctcccatcaattcacgggcacgttcatccatgataacatttatatccagatccgtcaacttcattgcttcataagcggtcgcatctttagcggcacgcttacgtatactgttgatgcgttccaatgccagtttcttgtttccggcacccagataagcctcagcacacaacaggtaggtatcacccaagcggaaaatgacatcttcacgagagccgccttcgccccattgtatcttggtatcgctgaacttccgtaccatcggcatacgatctgaagcagtttccaatacaggaagtgccgtagattgcggataccatacatattcatcgtcctgcttgaacggataaaatcttttcgcattattactcatacccgatttatcgttccaacgggggaaatagattcccagcttaccgtaatcagcattatccggattgtttatgtaatattcacgtttgaacgtcgcatcataacgggtatccgcttctgggtccgtataaagctcgtgcgctttcggattcacccagtatttacgggaaacactagaataatcattctgattcttaatgaacagatccggctccaatgctacaatgttaaatccgaactgtgcctgttgcggatttccatcaccccgatagttcttatccagtccatattgaatcgcccagattacttccgaattagcctgattgttttcatcgaacaaagcagcatagttttcctgcaaagcataaccggaggccggattctctaccagcaaatcaaatgtcgttgctgcattggagaagtcgtctgcttcagcaaaggatttgtaagcacgtgtcagatacattttccctaaaaagtgaatgactgcggcgttcgttacctttccggctgaaatcgtggtcatctccaatttgtcctttatatcattcagttcggtaatgatgaaagtgtaaatagcctgttcgccggtacgttccgcctgctggataacgcttgtattctcttcggtgagcaaaggtacggggccgaatgtttctaccagataatagtaagccattgcccggaaaaagcgggcttgtgcggtcagcgaagtataatcgcttcctgcaatatccggtgtgcagcgattcagcaggatgttactttcctgcacaatcttatagagtactttccaataatcacctacaatcggagcagtggagttgaaagtcttgtcatagccgttgaacatacgttcggcaggttcttcggagatagccatgtagatatcagttccgtaatactgcaattcgcctgtattgaaaacattgcggtaacgggcattgatatctgtcaacaatttctgttgtccttctttagtattatagaaatcgtccgttactgccgaagggttataactatccagaaaatcggagcatccgcttagcaaacagattgctaacagtgccaaatatttaatttgttcttttactcgtttcataaggtttcaagtatttagaaggttaaattcactccaaaagtaaacgtcatcggataaagtgacaaagacttgtatacgtcttcaccaatcgtttcgggatccggaccgagatagtcggtgaaagtaaacggattctgcacattgatgtaagcacgtgcatttttcatcttcatcttcttcatccagttttccggaagggtatatcccaacgtaatattctgtattttcaggaacgaaccggaaatcttacctaatacctgagtatggtaggattgtgcaccgatctgctggtattcattactgtggttttccggagtccagtacttcacattcagcttgttccagtgttcattatcccatgcggtaaacatataagtgaaatcatcattgtaggtaccaccgatacgtgcatacatatagaaagacaaatcccagttcttgtaagtaaaggtattggtcatacccgctgtccagtcgggtgacggagagccgagtactttatagtcacgttcatcaatcacatagttctcgtccagatcagctacacggatatgtcccggtacttgtccatatttagcagccagttccttgtcttccgtctgccagattcctactttttccaaatcatagatcactttcatcggctgaccgatgaaccaacggttagccaagtcatcctttttatcaccgtagaggtctacaatcttattacggttcagagagaaagtcagatttgtcttccatgtgaagtccttctttgagatgttcaccgtgttcaaacctatttccacccctttattggaggacgttcctatattctcaaggatagagccataaccgttgaggttacctaccgaacgggcgaaaatcaaatctttcgtagtacggttatacacatcaatcgtaccgttgatacggttattcaggaagccgaaatcaataccgtagttccactccgaggtcatctcccaacgaagatctttgttacctttgcggtcgcctaatccgaaagcattttcacctttacctccatagatataatgagtcaggtccagctttgtccaggtaatatcatggtcaatactgttgtttcccgatttaccccagctgacgcggagtttcagactattcagccagtctacgtttttcaggaaattctcattcttcatctgccagccgacagctgccgacggcataaatccccactgattgccggtagccagacgggaagttccgtcatatcgccctgttacagtaaacaagtaccgatccatcaacgtatagttgacacgtcccatgaaagaaagcatggatgactcccaatagtaactcttcacatcacgaatttcctcggctgtttcgatcgcatgccagtcagagttgtaaggcagaccgtcgccacgcatttccgaacccttatgagtttctttctgtacactatacaaacctatagcattcagacgatgaatattcttccaggttttatcataagtaatgatattgtcccatacccagttcatattccgtccttctttccggtaagcttccggtgcattgagacctcctttggcttgtgtcatcgtacctacccattctccgtaaacatccgaatcatattgaactgcaatctgtgatttaaagctcagtcctttaatcggctgatattccagataaccggagaaattggtatagtttgcttctttctctcttttattattttcaatctgaacaaatggattaatcttgctggaagtcggctgacaattaaacaggtagcttccgtccttatcgtacgggctgaccgtaggcggcaggaagtatgcattaatcaaagcatcattggctccttcattcgtgttattcagagaaacatagctgttaatccctgttttgaatttatcagaaaaacgatattccaaccccacattagccgtaatacgttcaaaactttcatcgcctaccataccgtcatccttcaagtatcccaagccgaatgagaaagatagtttatccgtacctccggtagcggaaacagaatgactggtagtcaatgcattctgcgacagttcacgcaaccagtcatagtattcaccatgtttgatacggcgtttctcgtcatcagtcagaaagtccggacggctcagtgaagcatcaccatacttctttttccacaaagcggtgcgatagtctacatattccagtccattgcccatgttaccaatcatttcaggaatacgggtaggagtcttgaaaccaacgtaacccgaatagtcgatattaaagccctgacgcttgttagctcctttggtagtgataatcaccaccccgtttgcaccccgcgaaccgtagattgcactggaagacgcatctttcaagatgtcgatagattcaatatcggcagagttcaaatgacgcattcccgtttgagaaggtactccgtcgatcacgtataaaggttcattcgagaaattgaacgagttgataccccgaatctctattttcgtatccgaaccgggacggttggaagtcttattcacgagtacaccaccgacacgtccgttcagtgtttcagtgacatcggtagtcaccagtttacttaattccttgctggtaacggattggatagaacctgtcaaatctttcttttctaccgtaccataaccgataacgactacttcattcaactgcttggaatcatctttcaactgaatggtaaggttcgactgattctgatttacagtcagttcctgtgtcacgtatcctataaaagaaacagcaatcgtttttcctttcggaacctgaagactaaaattaccatccaagtcagtcaccgtaccggtagacattcctaccacctgaacgctggctccgggcaacggttcttttaaagcgtctactaccacacctttcactgtaagcacctgctgtgcctgcacacttacccatccgcacgtcagaagcagcaggcagaggaaagcctttatttttatcgtattatttttcatactcttcgtctgtttattaaggttagttctcaactttaaaccatttgtagttacctacaattttcgcaacgtgttttcctgtcttatccggaatgttggtaacgtcttcgaccactgtcgtgaagtcccacgcacataccagtccgctttctgttcccgtcacatccgagttcatcagcgtttttacctcattcgccgatttcgcagtactccacatgcggaatttcttaataaatccggtcatacagcgtgaattgtcagtcggttcctggaatgcccacatattctggttacgggtgttaggcatataattctgtaatactccggcatcattcttcacatcatttgtcttactgaagaataattcaccattgacatacattttcagctgtccttcaggcaaagtattatcccacaccgtcacgacatgattccatttaccaaaattatcaggataagcacggccttcttccagtacgcggccttcctgcggtcccataccgatcgttgtacgaagattagagcctaagaagttgatcatccatccctcattcggctgcttaccgtcaaaagtagagaggaaactgccaattcccgactcaaagaaaccggcatcatacttcacccaactttctacggtgaaagtattaccgccaccataagcaggatcggaaccaaattcaatacgccctttaccgtcaatgccgaatacctttaattcggcaggcgtacccggttgcaatgtctgttgataggaatcctgaaattcggcaatcgctttttcggcggctatacagtagttatctatttcatactgtagaacaaagtagccagccatacctttagaaatacctgtttgcagttcttcgacagctttttgcaggttctgggcatttgccaatgggaaagtaccgtcacttgtaccgatctttgcggtatcaagcatgtttgtcatgtcggtcagatgcgtgtacatgcattcaagtgcaataggccgcactgaatcgccgttatcgctcttacacgagctgacacaccaaaccaacaaactgaataaacaaagtttcataaagaatcttgttttcatacgtattaggtttttaaataaaacaataagtaaataacatcgctgcaaacataatgtagcaaggttaaacaacttattagtgatgggttaataacggattaataagcgaataaatatcattaaccgatatgtttttatcgatgaaaaggaggatttttgctcatcagttctgcataggaagtagaatattcttcattcatcatttgcctgtactcacgcacaaacagggaatattgcagaatcgcttcttgtgacgaacctgtatggttaagggcatgcataccataagccagtgccagctcattaaccggatcaacccggaaaagcacattacagaaatgaatgacggcatcatacttatgctgctgatacagacgttcgatttccaatggcaggaaggaagacaagaactcttctactttttgcttgaagtgatccatcatccctgcatccataccatcaaggaatttgccacgcattaataaaatgccgagttcattctcgacctcttcagcattcttcaaggtgcggaaacggaaataatcacaataacagtcagtaaacaccagtctgaaatatcccttgtcgtgtacaagttccactccatccagttcagccagatttttacgaatctgattgatcgttacccctttcaggtttttcaccttgtcgtcgggtttatcgggccagaagacctcatttaaggaggcggataatactccattatgagtactatgaagcaagatatagatgaaaacctgccgtaaacgggaactgaacaaatgagtaatatcccgcccattccggtcaattaccgtaaaaggaccaaataaataaactgcattcggacgaacgagggatgactcaaaatcttcttttgcaagcgtttcttttccctgtacacttttatccggttctctcccgacaggtggtgacatgagcacagaagatgattccagaaccgcatttctttgttttcccctctttttcctgacaaacagcacacctccggcaagcaataatactcctattcctgccattatccataaccaacgaatctccagagaagacctggaaccgtaagaacggatttcatccagagaaaccggaggggcggacagcacataagtccgaatcaccgtatgtcccttcttgtcaaattccgtggtcgtacagtaatactcatgcgtcaatgaattatagtaaaggttagcattcgtcataatctcttccgaacgcatcggaatggaatctcccaaagctttcatcgttccatcatcaaccgtcaagcgataaagttgcagataggtatccgaaagatattccggataacacagagcatagatatacttctcatcaggggtcagtatcatatcacgggcgacgaccaaacgatgacccgaagcgttctgccacaaacgtcgcacagactgctgctttctgtcaagcagataaagatcgtgaagataatttcggcctacactctgctcacccgattcatttcccatcccgccaaagacatagatatgctcccggttcttattgactgccatacccgagaaataacgggggataatccggtcgccggaataagaaagggtatcccaacggtcgccctcgatatcatattcgaggaatgtattattaaaacgcttattaccaaaaccgccaaaaacgagatacttcccggttgtttcatcccaaaagccgtcatgatggtgcaactgtaccggcaaggctgctactccggtctgtttccactcctgattattcagatcgagcgccgctaccgtagcatcccccaacggcaggttattcaattcataaacataaagtttaccatccgttgtattcatgaaatgagtagccaactgcaattttacgggtagtttgttgctataagaatacttttgtggctgacgtttcaacagattataagtaagaagtgaatcctggctgaaaataatcagtcgctgactgtccggctcaaaagtgattcccgaaggagtctgaaaagaatactcaaaaagtttctcccaatgataagaaccgttgatgagccacaccggattgacaaccgtacccaaaaccttccctgtagaagtatgcacttcttccccttcattttcattcagagggaaagtatatgaatgacttctatcaccttccagcttcagattgcggatggcaaaagtgggcatatccaaaatataatcataacgtccgaagaagaggtgcggacaaaaagtatctttcaatcctaaagaagtaatcttcttttcgttatctccgatacgaatcgtaagtacgtcctgttgcaaatcgaatgcaaaagacacaggaatccattgataagccagtgcatcattgcgcagatttaaagaataatgattctcttttccgtcggtattaaacttgaatgtactgttctcaccatccagataagtatacgtaaagctatatttagttttcccctgatcttccttcagcagaaaaacatatccaaaagtatcaaaatcgcgaatagaaagttcaaagctcaactgaaagtttttcgtaaaacaaggtatctccccttcctgaaatatctgaagagaagtcctttctttaatttctttatcattagcctgaaacaacaatccttgcgaataagcaaacagagtcattccagtcagtaggaataagaggcaaagcctacgtcgtatcatagtctttcgatttattatcacaaatatacaggattattttaaataaccgcctaagcagatgaaaatcacctttgtcggtaccctacagttccggctgtttctttctttaatccgcacctttttctatcacccagccatttccttccgcccatatacttacctgatatcttctcctgttaccgtgtataaataagacagtcaaccacttcttatgcttcatcgtctaatatatatttaagttagcaacgtgcaaaagtaagaaaagaaatagataccatccatgatagaatgcaaattaataagtaactttgcagaaaattgaatcagtacagactatgtggatacttattataagtttggtgttgctaggtatcatcgcattgatagccggttatatccgcaacaaaagactgcaacagaaaatagaaaaaggtgaactggaccgtatgccggaagtgaaagaagcagatatagaatgctgcggacaacacgaagtgtgcgagaaagatagtttgcttgccgccgtaagcaaaaaaattgaatattacgatgacgaagaactggatcagttcatcggaaaggaagcaaatgcgtatactgacgaagaaacaaaccaattcagggatgtgttatataccatgcaggacattgatgtcgcaggctgggtacgtagtttgcaactacggggtatcgagttgccggatgacctcaaagatgaagtctttctgattatcggagagagaaggaatggggagaggtaataggtattaagtaataagtattaggagggcgttgaagttgtttttattgatggacggcattattcttgctttgatttttaattttcaatctttaatctttaattaaaaagtggatctacttcgatatacattcttccaacacgctttgctgggcagcttactggcaagcattgcctgcgggattatcggtacttacattgttacccgccgtctggtatttatcagtggaggaatcacgcacgcctctttcggagggataggactgggactgtttgcgggaatttctcccatactctcagccgccgtcttctctgtattgtccgcattcggtgtcgagtggctgagccggcggaaagatatgcgtgaagattctgcgattgccgtattctggacgctgggaatggctttgggaatcatgttcagtttcctgtcaccgggatttgctccggacttgtcagcttatcttttcggtaatatcctgaccatcaatcaggcggacttgtggatgctgggcatattggctctgatattaaccggattcttttatctgtttatccgtcctatcgtatatattgcattcgaccgcgagtttgcccgttcgcaaaagattccggtagagatattcgaatatgtgctgatgatgtttattgcgttgaccatcgtcgcttgtctgcgtatggtaggcatcgttctcgcaatatcgctactcaccattccacaaatgacggccaacctctttacctacagtttcaagaaaatcatctggctgtccatcggtatcggttttctgggctgtctgggcggtctgtttatttcttaccactggaaagtcccttcgggcgcttcgattatattcttctctatcctgatttatgccgtttgcaagatcggaaagagttgttgcaagaaacagtcataataatagaatagtatatggaaatcaagattcaatcactggaaagtatccatgaggcagcccgggaatttatcgctgctatgggtgataacaccgttttcgctttatatggtaaaatgggagccggcaaaacgaccttcgtcaaagctctttgcgaagaattaggtgtatcagacgttatcagttctcctactttcgctatcgttaacgaatatcgttcggacgaaaccggagaattgatttatcacttcgatttttaccgcatcaaaaagctaagtgaagtatatgacatgggatacgaagattatttctacagcggcgccctttgctttatcgaatggccggaactggtagaagaattactgccgggagatgccgtaaaagtgacgattgaagaactggaagacggaagcagagtgatcagactatgaccggacaatacatcgtacaaggaatttttgcgctagcgggaatcacttccctgctagcttccttactgaactggaactggttcttcaccacacgcaatgcccagacaatcgtccggaatgtaggtcgcggcagagcacggctcttttacggcatactgggagtcattataataggaatggctgtattcttctttgtagaaacacgaaaggcaatggggcaaccccttttctaaacaaacaagaagcccgataaggaaataaaagaactacatcagaccaatcaacgactcttactacagcagttgccgtgatttcatctccaaatatttattgattacgtcaatagacagattttcgggtgtcgtcagcagagagtaaatgccatgctgctttaatgtagaaacgatcagtcgcttctcaaaagcaaacttttcggcaatcacgtgccggtaataatcttccgtatccctcgccggactttcgatgtatgctttcaagtcagcatcttcaaagaaaaccaccagcaaacgatgttgacggttgagccgctgcaagtaagccaactggcgattcatgctgctgatactggcaaagttagtatacagaaccaaaaaactacgcttattgacgtgcttgttcagatgcacacaaagagccgagaagtccgtttcaccaaaggtagtctgctggctatacagcttttcaagcagcgtctgcatatgtccgggttgcttggaagccggaacgaaggtatcaaaatgctcgtcaaaagtcaccagccccgctttatcctccttccgcatcgccacatacgagagcaccagtgaagcattaatcgcataatcgagcaaagtcattccccgaaaggcctgctgcatcaccctgcctttatctatcacactgtaaatctgctgagagcgttcgtcctgatagacatttaccatcagttcatgccggcgggcactcgctttccagttgatagtccggtagtcgtctccttttacatattccttgatctgctcaaattccgtttgatggcctacccggcggatacgcttgatacccagttcggtaaggttatcactcattgccagcaattcgtatcggtgaagcatcagataggaaggatataccttgatatcctgcggctgtccacaagtgtaccgacgggaaagcagcccgatcttgtcggtcacaaatacacggatttgcccgaaagaatatactccgcgacgggtcggacgaagatggtaactgattgttttcccctcgttcggctgaagggtggtccggaaacagacatcccgattctggaagataaaaggtatttcatctatgatctccagagagagaggacgcgaataagtactttcgacacgaatgctcacttcattgtcatcgccattggagaaacggtcggaacatcgacggaatgcctgaatcccctgggtacggtagagaatatatccgtctgccaataccaacacgaataaggcaaaaagcgcccactgcccgatgacaaaaaacggagcaaacagatatccgctacccaataagaggataaccaaaataagggcaatatagaaacgacgggttaagtacaatttcgggttctgagttttgagttttaagttttgagttacgaattatagagattcggttcttatttggggacctctactttatcaatcagacgttgcgtaacctttaccggagaatatccttccatttccgcttccgccgtcaggatcagacgatgctgaagcacatacggagcaacgaacttaatatcttccggtgtcacgaagtcacgtccctgcaaaagggcatacgccttggaggcttgcaacattgcaactgatgcacgcggagaagcgccaagatatacagctttgctggtacgcgtctgctgcacaatcaatgcaatgtattggagcagcgtacggtctacaaatacctgattcatgaaggcacgcagtgacagaagttcttctttggtgatagcaggcttgatatcgtccagcctgattaatgaagtgttcgtatggtgacgttccagaatatccacttcttcttccagcgaaggatagtccatcgttattttcatcagaaagcggtcgagctgcgcttcgggaagtttataagttccttcctgttccacagggttctgtgtggcaaggatggtatagagctcacccatcttatgagtaatgccgtcaatgcttatctgacgctcttccatcacctcgaacaaggcagcctgcgttttggcaggagcacggttgatctcgtccaccaatacgatatcggcaaagatcggtccctgatgaaagtcaaaatcattggttttcatattgaacacagtggtacccaatacgtcgctcggcatcaggtccggcgtaaactggatacggctgaagtccgcatcgatcagacgagccgtcaatcgggcaagcaatgtctttgcaactcccggcacgccttctatcagtacgtgaccattggctaggatggctgccagcaccaagtccaccgtctgttcctgaccaacaataacggaagcaatctgatccttcaattcctgtatcttctcggaaaagagagttaaatccactcgttgttctgtattctcttccataaatatcttctttaaatatgattgattatttcattcattttatcaataaatcccttcatttcttcgccggaaagaacacgtcctccataaatcaccggtctgattttgcggattaacctgctgatttcttccacctccatccccgtcttctgagcgatccgatggaaagaacgttcatcgtctgctacttcctccacatctacctgaatttctcttctcagcacttccgcaaagtaggtgaacttcttatgaaccagattggcatggtcattcttctgataataaagcgtgcctatcaacttggtaaattcaagggatttgttttccggttcctgtatgacaggtattgcccgttgccgcctccgtgctgtaaacaccataaagagcaagatagcgaacatcgacagatagatcgcccagcgaagcggcctttgcgacagaaaataacgcaaaggagatcgctgcgtctgtgcagtctccttcatatatccttcggtgcggacaataggcaactctcccatctgcgacaggatgcggaatatgtaagtcgcatttttctcatccagcactccataattggtaaaaagcaaaggagtagaaaccagaatgatttcaccctttccccacggacgcaccatagccaccaacggatgataattgcgggaaacggtcgtagaatccagttcatccaatgcgtgccccatatcgcttgccagattgatctccgccagtttacgtaccggcagcgaatcataacggcggaaataggacttgcagaactgcggataaaaacggaacacctgccgtgaataaacttccggatcaccgatccaataaatactgtcccgcttcaataacgaagcggcatattttttcaaatcgaccgatctgaaataagaataagtgcaatcaaacttcagcgtatcctccaaaatcttggtaaaagaactgcttaccagcatgatcttatttccccgatccgccattttgagcaaggcttctatatccacccgtccgaaaggtaaattagtggcaatcagcagtattcctttattgtgaacagtatcttcctgttccatctgataaaaagtctttcgggacagtgtatatcccgaaggcagtgaaacagtcagcagactgtcgaacacagcgcatccgaaaggctgctcatcgtaatggctaaaggtaggcacccatacaaatttcttcggcagatgatattctatagcaaacatcagcagcagaaaagcaaggacaaagaagataaaccagcggcttcccctcatgagccccctcctttccctatttcttcctgcaaggatttcatggaattgaacagttcttccgttgcctcaaagttaccgtaacgaaccctcaggaaatgattggtcaactgacggaaaacgggtatccgtacttcattgatatactgtgtcggtgttttataaggctgccagtcaatgcgtttctcgtcgctaagccgtttcaatgtctgcaaataaagcagacgcaccgcctcccgataatcggaacgggaaagcgcatcggcaatccctcccgaaaaatccacaccgtaaatcgtatcttctcccacttcataaggcagtttattcttgggcgaacgcatgaataactccggacgcttcttataaacaaaccatataatcaggagcagaataataatggccagacatattaatataagttcagaatactcttcggcaaaacggctgccgaatatcttccgcaacaattccccaaactgcctgcgaaaccattcaaagatattgatttcaggagttatcagttcacgattgtagtcatacgccgattcggattgccatttggcaatctgcacggtgtcgcaaaccaatgtatcagccggggatgtcagcatctattctgaattatatatgtttagagtttatcgaaattatcaatatcgctctctacagttacactatctaccacttcggaagcgtgaccgtactggtaggccattccgacaaaagtgaaaatcatggaaagataagcgccgaatgcctgtacaataccaagcagataaaggataaagctatatcctgccgatactgtcgtctcgcttccgacatcacttaatgagaagaaatatttcaccagcgtagcgatataccacggcatcatagtcactccctgcaatacattagctataaatcccatgatcagagatatcaagaagacgcctccccaagtggcaaagcccagccggaatgtctttttgaaagactccatcactgtaatatcttcaaacaggtagataggtgcccataatgcaagcggcactacaaaagcgataagaagcggaatggtcagaaacaaggtgaacagtgacagaaacgccagcagacctaccacaagccccacgaaaagcatgactaagatggagaaaagggtcattacaagcagtctcttgatattgcggaacaataaaggcttcaaaatacccaacgtgattccctccaagcgttcttcacgttcattataggtacggatcaatgcatagatcatggaggtcagcaaaatactgcctatcataaatacaatcatatacagaccgtaataggacataaatcccaataaagatgcagtatccggcaccgtcgcagtcttggacatagcagtcatggcaaacgctcctcccatcagtccgttcagacttaatgcctgaataaggcttacaggcaaaagcagataagtcgtaaacttcaacagtattttccaattctcttttatgaagtcaaaagaagcgttcaacttatcaccgaaagaacgtttcacgtacattgcaaccttaggtttctgtgattccatgtttttttctatttggtaaataaatatagtaaaagatgataaatgcaagggatgtaaggatgatgccgagcctcagcatatccggaagttcggtgtgacgggtgataaagccttcgataaatcccgccatgataaacacgggcaccgtaccgattacaatcttcagccctcttttcgctcctctgcgaaaagattcgagtctcgaataggtgccgggaaacaaccagctgttgcccaaagcaagtccggcagcaccggctacgatgatcgcccatatttcaagagttccgtgcagccagacggcaagtgccgactcccaaagcaggtcgtgctgataaaagaacatctgaaatgaaccgagcataattccattctgaagaagtataagccccgtaccaaaactggtcagtatccccgcggcaaaacacaggaaggatacttttatattattgattgtaatgcccagaaacatcggagcttcgggagagccattgtatactgccatcggctcacctctggcaatattgtccaatgtcatatctacgtattggttgcccattatcaaacgcacaaactcctgatcattggcggcagatactgccccgatcaacgcactgacggcaaagatgataaaagagatcagtaactcacgctgcgcatcatgcatggtctgcggcacttcccgtgtccagaaagtgataatgcgtgtccatttctcacgcttgctccgatagatttcattatgcagggctgaagcgagattattcaaataaatggtaatgcgggaagtcgggaaatgggtctgtgcaaaagccaggtcggcagtcagttccgtataggcgtcggcaagttggtcaggggacaggtttgcagcctgttccaccaccttttcggtccctttccatttttcaatgttccgacggataaacgtaacttccttcatgcttttcagagatttcggataagttttgtccgaaaccggaagcaaaagtaaaagaattatgatatatttgcaacttaaatctaaaaatgtttaaccaagaatggcagaatctacgattattatttaaatattcaataaaaagagcaacaaagactataaatcagcctttgctgctcaaaacagacctaagccccagtttatttatttatgatattgtaaatcatagaaaagttcctatcataacttccattagatgtatcaaaagtaatagagaggtctttatttactaaataaaagccatcgtaatatcctccccaacccatattcgtatggaaatagaaatcaaagtttttaaccaaatatcttgtttggggtctccagtatgcaaaaccatctaaaataaaagcatggcttcccccacgattagaggttgcagctacccataccaacttagctagttgtaaagattgaaatgcagcattaccatcccaaccatttttaagaccactagttgaaaaaaaacgatagaaaaagctagatgtatcagaagaataagtaccagacccagtaacataaccacttgaatttctaacaggctgtgtattagttgctatatagatatattttatcaatttagcaaccatttctctagttgtttcagaggaaggagtttgccaagatgaaggagcaataatttgtttttgtgctttcaagatattccaatcaattttcagaccatcaaccgttaagtcaggttctaaagaagccataatctgtgctattgaaataacagcacaaccagcagggacagcctcgtaagtaggtgagcctgtatcataaagatcacaattttctttctgtagcaaatcattatatggtgcgtcttgattccactctgtactactacagtacagaccagcaaaacctatcggatttccaacaggaaatgttggtccagaacgggatagaatctcatcctttactataattatatcttgaatctcatcatacctcacagccttcacgtttaaagtttttgctattttcgctaatgttttagctctcagttttgattttaccttttcataatatttggcatcttccaacagactcaattctgataaatagagcatagacttagaatctacatatttaacagagtcttttaaatctgttttaggcaaataagccattatctttgcaaaacgttcatcagcaggaacataagccacacctttcccctcatcacttaaaaattcaattttataaacaggaatagtagtaagattagttgaaccgactcttgtttttaatccagaagaactagatacattatatgtagaaatagccataatttttacattattatttctagtctgtaatcctgttggattaaagtccaaaacaagttgcttagcctcttctgaagtaattattccaggattatcataagcaatgctaatatactcatctgaagataataaaattttagaatcattcagattatcttgcatacctagttcattactacatgaagtaaataaagcaaggataactaacaaaaaatagtatttcaatttcataagttatataatttatggattttgctttattgtatatgtgctcattgatgagccaatataagaaagccataagattatctccctaatatcaccagatgtattttcgtctacaattactgtcatcaccgaatcctcctgttctttttttattgaaaaccaatcttcttcaagcaaaaaagtatgggtcatttttacattgagagcaatagaatccttattcacaacagtcccagcagcatgcaatctccatccttccgcaggagtcataataataaaagcagtatcacctttattatctaataatggaggctctgatatcctgtggggaaaatcattgatatatatttcatcatcttctgcatcattacaactaacaatagcaagaagaaaaatcagaataatatacttcattcttttacaatataatatcacagatcatattaaagcctgtgtttaattcatagcctccagcttcaaaagatatcgacatatctttattaactaaatagaagccatcataagacccagcccatcccatattcgcacggaaataaaaatcaaagtttttaaccaaatatctcgtttgaggtctccaataagcaaatccatctatcacaaaagcatgagaagcttttttagaagcatctgaaacgccaacccatatcagtttagctttctgtaaagacaaaaatgcagcattaccatcccaaccatttatcaaatctcctgttgtaaaatatcttctaagaaaatccctagtttgaggtccagatgtaccagaacctgttacccaatttgttgttttgtcatattctggatgagtaccagaaaggtcataaatatgtttaaataatttagcaaccatagttctaacaatctcaggtgatccctgatttggcttccagggtagcggcattagtatctgcggctgtgctttcaatgcttcccaatctatttttataccatcgatagttaagtttggttcaagtgaagccataatttgtgccatggcaacaaccgaacaacccgcaggaacagctttatatacaggttccttcccaacatttggtgcacaatatgctttctctaataaatcattatatacaggttcttgatcccaatttgtcgccatacaaaaaaaaccagcccacccaatagcattgccagcaggatcttgaggggttgcacgtgaatctagacaatcctcgacaagaatcctatctttgatctcattaaaatttacggctgcaacattgagctctttcgatattctttttaatgtttcatctctaaattccaatttcattttttcataatgtttggcctcctctaacaagctttgttctgacaaaccaagcatagccttcgcaccaataattttagctgtatcctcaagatttaccttgggcaaataagccataacctttgccacacgctcatcagcagaaacataagcaagtcctttccctgcatcactgactatttccatttcatagacaggaagaagaattgatttgtctgtaaccgatcttgttaccgcattgctgcccttttcttcaatattaaaagaagagcgaaacttcacaacaatattttcattacctctcgtctgcactctgttaaccccaaaatctaatgcaagttgctttgcctcatcaggagttattactcttggattatcataagcaatactaatgtattcatccggagataatacaattgagttagattctatcggcttattatgtaaatccaaaccttcttcatcattacatgaagctaataacgacaatacgaaaaacaaaaaataatactttaatttcataataaatatttttaagtttcaattgaatatgtaatctgtacaataataaatcaatgttatctttttcttatatcaggtataacacttaattgcgtatcccaataggtattaccaccagtctcaaatgaaatgcttccatcattgtttaccaaataataaccatcagaattacctgtctttccaaaattacaatgaaaatatgcattactgctagaagattcgttctttgtcattgcataaccatccactataaaagcacttccattacattctaccaaaacaggacatattttaataacagaatttttaactgtttctatactccatttttgaatattaccacaattggttattccacttcctgaatttagatatttatacacattagataatggagttgatattgcagtaatgcaagacactaatttagattctgagtccggccatacatcagtataggcagttccccaaactggagaagaagatgtactatcatatacatatttaaataaagatgcaaccatattccatttctcataaggatcatcataactaatacttttactttcttttaaataactccagtccattgatatcccttcacaagttaattcaggctctaaggaggccataatttgggctattgcagtgttggtaagtcctactgggcgtctttcccatgtacatattttacgagaaatatccataggtatttcaacccaagtatttacaaacttccaactatatggttctttctgtccccattctgtagtacagaaaggttcaatcatcatccaaacctggccatctaaatcagtaataggcctagagcgtgtaattgcctcactattattggctatttcgtctaataatgcattcttcgacatttgaatcatagcgtttgctcctatctgcgttgcaaaaatggagtcattataggaaggtatatacgccaatacctttgggaatcttctatcaccagatacaatagctttcccttgttcatatctattccttatttcaacttcataaactaaagcttttacatcattaggcaacgaacgggtaatttctgaatttcgagacgatattaaatatttctcactaatagcaaaaattggattttctgttatttcgcctctcgtatctgtcttagatttgatagacttttgaaaggattctacaatagaaataacttcattttcagataacgcattaggatctacttgtttaattgcattccgttctgcatctattatattctcgttactacacgaggcgataataataagcacgactaacaaataaaattgtataaatatttttctcataatattatagttaattaaagttcaaaatcccccgataaatcataatctttagacaaaagctctaagcggtaagcagttccttccaccaaattcaggtctaaagtaatcagacttacaggatttatgaaagtatttagatacactgtctcattagtatccaaattaattacggaaactgtcacactaggtacttttgaaaaaaagtcgaggcacaatacattgttatttatagatgcttcaactgggtagatagctggtattcgagtcgtttcacctggtttactaccctttccttttaaaattatttttctagaagaacaactcaattccatattgcaacctcttatattacaatttggagaatttcctagtattagatccgaaaagaaaatacctaggaataataaaaatagtagttttttcatatactgttcatatttgatgtttaacgctgtaaatatgagcagtaagcttaagaaaagtattataccattatgttaacgaatgcaaagaatgcgttgtattgcataaaactcaaataataatacacaaagcttagactttgcgtaatatatcaaccaattttactttcttatctttatttaaacccatcttttccaatacagaccaacttcttttatatacagcagcagaagtgcatccccaaagataggcaatatcggcatatttaaaatccaacctaactaagcaacaaaaacgaatatcttcctccaataaatactcatattcagtgcttaatctttctacaaatcccaaagatgccatatctatttcatgcaataaaattacccattcatcattagtaatcttcttcattccatcagggttaagtttattatactcacacaatgctatcaacatttgataaataggagaagacattaatataaatttcagattcagatttctcaatcgccttacttcctcatctctttctacaagccggcgttctaaatcttcttgcattgaatggtattgttctaatagttcattaagacaactatctaattgcactttggagttaacatccgactctaaacattcacaatgttgctgtatttcttttatttctagttttttttcctccaactctttcttgatagcctctatacttttatacaacaattgacgtttgtcaaccaatcgtgctatttctttcttcctttttctacgcctctgcaaaaagaaataaatcgtaataataaacaataggacaaataacaatagacaaaaacgataccgggtcaaaaaggattcatagcgttccgttgattgacgatataacacatcctttaaagaagaaactacctcaaccggttgctctactaatttcatggaatccttatatatagtatataaagtttcgtactccaatgcttcattttgttttcccaacctcatcgccatttccgatagtttcatgtatgcatttgtttttgcataataattatcagaaggtatgcctctattcaaataaacaaaggctgaatcatattgttccaattgcaaataagcactcccgataactagatagtaaccatatctctcagagctgtctaataccaaccgcatacctttatttgcatacaatatagcttcgcgtgatttcccttgatattccagaagataactaagagaactaaacacaagctcctcagtatgttgtttatctgtatctttcactagctttagagcccgttttaaatatttttccgcatctgtataatattcttctcctcgctccatgcaaatatctgcacaatgtactagcactacggctaaacgcaatgaatcatgatgtgcttcagccaattcaacagcctgtctataaagagaatcagcctcctcttgcaacccatgccgccagaataataaacccaaattacttttcaatagaatatttaaatcataattttccgctttctcagccaaaggcattgccaccaaaaattcacgtacagttccttcaatatcacctctgtcttgacaaactcgtccaagataataatgagcttttgcccttagggtaatatcatcggaagtgtcataataatctacagcgacacgaattagcgaatcatccgtgtgagtaacatagttctgatctttggcttgtgttaacaatagggcataactagctctagactgtatagaagacaactcagcaagattcatacgttccaataaactcaatgcactatctgcacatccaacttctatcaaagaatctgcacgcaataaagaaggaattaccctatctgtgggagaaaggcaagatgttaaaaacaggaagatgattccatagacatagtttacattcatcacttttaatagatttcgaataagttttgtttgagagcagaagcaaaaataaaagaattatgatatatttgcaacttaaacctaaaaatgtttaaccaagaatggcagaatctacgattattaccggtcagtttgttcgaatcagccaaacgcccgccagtatcggcgaacgattgctggctttggtcatcgattattccctgattgtgatttatctatattctgtgacgacactcattgttaaactgcatttatcctccggagtcggtacggtcttttttctgtgcctcgtctatttgcctgtacttttttactcgttcctctgcgaaatgttcaatcacgggcagagtttcggaaaacgtctgatgaatatacgcgtcgtaaaatcagacggttctactcccagcatcagtgcttatctgctgcgctggcttctcttcatcattgatggtcccggtacaggaggtttagggcttttagtcgttctgctgactaaaaacagtcagagactgggtgatttagcagccggaacgatggtgatcaaagagaagaattatcgcaagatacacgtcagcctcgatgaatttgactatctgacaaagaattatcatccgacgtatccacaatctgccgatttatcattggaacaggtgaacgtaatcacccgaacgctggagtccggtgaaaaggatcgggtaaggcgcgttacgttactcgccaaaaaggtgcaggaaatcttatctgttactccacgagagaataatcaggagaagttcctccaaacggtacttcgggattatcagtattatgcattggaggaaatctaaaataagaacttacacaacacgtatatacactaccgtcttcccaatcccatatttctgaataactcccttttcaatgaaaagattcaattgccgtatagcctgtgttttattcattccggtgatagcacaataatctgcccgattgatacaaggatgtttctccaaaaagtcctgcaatcttttcagacattcttcttctgatatgttcatattggaacgcgtaggggaagatattcgttctaaatccattttagagttcagttctctcttatatgtttgctttacctttaatttgatatttttcagatggacagatggagagcgcacttcttttctgtcagtgatttctttctccaaagagagggtcagagaaaaatgccccaaatctccaaactccacaatatatcctctggacaacagcgtctgcaactcgtcggtgatagcttccactgctccaactaattgcgcatgaggaatatggtgcatcatggatacccgctccacaaactctttggttgtatatgttccgcttggcactactcgtgcatgcagtaacttctgttcttcggtaccctctttatccggattctcataaaggtcgtaataaatgctcataagaataattttatgtttggctgttaataacttatctgttactatttaagcaattagtcgtttgcttggttattttctttcgttgcacttaggtgcaacgaaagagtcacctacgtgcaacaattgaagcaccaaggtgcttcaattatcagaccttagtgatacgcaataaaacaacgaacaaagatactaaaaatctgaaagccccgaaactatttcccacatgggtatttaataaaataagtagatagcaggtacagtgtattctgaggaacacagactgaattttacagcaatggaaattacggattaataaaagctttgtggttgctttttaatattctcttatactccatactgtacatatcaaatccttccgcccaataattctttttaatgtcattcaaaacaaacccttgtttttcatagaatctataggctacttgtgaagtcctaacggttatcttttcaacactggagatagattccagcacttcaattctatgtttcaacagctttgttcctaatgatttaccttgaaaggcgggatgtatcatatcccaacttattttccctatagtgccgttttctgcaaaatttattcctccacacccaacgatttctccatcaacgagtaaaacatagtattgttctatttcttcatccaaatatttgcttaaatcattcgcctcctcttctgcgaaaaaatcgggagtattcagcttgattaaactcattatagcatctttatctgttggcagatattctctaattataattgattcgttgtacttcataaagtgttttatttaaaactatagaacaaaggtactgccaatttacttggcaggaaataccggaaagcgaaaacataaggatggaaaaagaaatagcctgaaagacgcgaatctttcaggctatattcctttcatttatctacagtggtgactagcgacaattagtccacctgccccagagagtttccatattccatttctccctgaaccacaaaaaggatttcttcgggatcatattctcccatttcgtccttcttggcttctttcacgatgtaagctacgacctcttccaagtcaatgtttacgtagccgtcgttatcgggctgagcgtcaagaatgccactttctgaatagtactcgtctatcagatcgagaaaatagtacagttcatcgtcctcgaacttctctttcagttcctgaggcagatagttcttgataaactcgacggtcttttcgtcatcggcatcttctaataaaaaatcatcttccagtcccatggttgtaagtattaagtaataagtattaaatattagacaaagtctagagaaggttcttcactttttccacgaataccggtttggcgactgcgcctacctgcttgtctacaatctcaccattcttgaagaacaaaacagtaggaatgttgcggataccgtattcggcagccacatcgctgttatcatccacatcgcatttaccgatgatgacttgtccttcaaactccgcggccaattcttcaataataggagccaccattttacaagggccacaccagggagcccaaaaatccaccacaacaggctttccttctgcaaggatttccttatagttgctgtctgtaatttctaaagccatttctttttaagtattaagtattaattattatgtattacttcgtttgtagatttgcgctacaaagataatcaatttatacggaatccaagttcggggcgctcctttaaatatgttattaaatctctgcctaccgaaagcttgaccggacgggaaatcagatcgaccgacatacggctgtccgtatcatccgtcaccttgaagtagagttccgtattgccgggatgttctttggtcaaagtggccagctcggtaataagtcccgaatttaacactgacagaggaatgataatggtgatcttctgcaccagttcttctttcacatcgggcagaagttccattgaagtgatcttgacttccagttcgtcctgccgccattgcttggcctgacaacgggctttgatatacaggaacgtgccttcattcagatatccctgataagtcacccagtcatttccccagaaaggtatttccgtagagcccgaataatcttcgatcttggcaatgccatacggattgccattcttgctgactccacgacggacactggtcacaatgccacccattgtaatctcccggcctgccaaagccgccttatcttccaaatctgccatacgggtattgcagacgtgatccagcacaatcgcgaactcatccagcggatgggcggaaaggtagatacctaccaggtcgcgttccttgttcagacgttcgaggtcgccccagcgctctactccctgaggtatttcgggggtggcgatatcgacgacattcgctccgccgaacaatgaattgatggcagctcttttgtcttcctgatagcggttaccgtatcgcattaaggtttcgaggaatacttcgcccttagagttgacggcaaagtactgctcccgcttcaattcggggaaactgtcgaaacctcccgccaacgccagacattccatattctttttattgcaggcattcagattgacacgttgtacgaaatcaaagatacctttgaatggtccgttggtattacgttcttctacaatgctttgcacggcagcttcgcctacgcctttcaccgctcccagtccgaaacggatattaccatcgtggttgaccgtaaacttcaggttactctcattcacatccggaccgagcgtctggatacccattgccttgcattcgtccatcagcttcgtgatatcggtaatgttggacaaacttcggctcatgacagccgccatgtattccgacgggtagttcgctttcagataggctgtctgataagctacccatgagtagcaagtagcgtgcgatttgttgaacgcataagaggcaaacttttcccagtcggtccaaatcttttcaagtactttcgggtcatgcccgttcttgcgtccgccttcgataaacttaggcttcatgtgatccagcttatcacgcagcttcttacccatcgctttacgaagggcatcggactcaccacgggtaaaatccgccagcagacgtgacaaaagcatcacctgttcctgatagaccgtaatgccatacgtatctttcagatatttctccatcaccggaatgtcatattcaatcggcttacgaccatgcttacggtcgatgaagtccggaatataatccatcggacccggacgatagagggcattcatggcgatcaaatcttcgaaggtagaaggctgcaattcgcgcaggtacttctgcattccggcagattcaaactggaacgttccgatggtacgtccgtcactatataatttgtaagttgccggatcggtaatatcgatctggtctacgtctatctccagactacgactcagacggatattctcaactgcctccttaataatagacaatgttttcaacccgaggaagtccatcttgatcaatccggtatcctcgatcaccgaaccttcatactgggtaacgagcatcttttcgcccgtttccttatcgtcggctgtacttacaggcacccagtcggtgatgtcgtcacgacagataatcgtaccgcaggcatgcacaccggtaccacgaacattaccttcaagcattttggcatacttaagagtgtctcgcaccaacgggtcggacgatgcctcagccgcttgcagttcggggacgtattcgatggcattccgcaggttcagcttcttgtcggggattttatccggcaccagctttgccagacggtcggactccgagagaggaagtttctgtacacgggcaacgtctttgatagccagtttggtagccatcgtaccatacgtgatgatatgcgctactttttcctgaccatatttattggttacccagcgaagcacttcaccacgaccgtcgtcatcgaagtccacatcgatatcgggcaacgaaatacggtccggattcaagaaacgctcgaacagcaagtcgtattggatagggtcgatcttggtgatacccagacagtaagccactgccgaaccggcagccgaaccacgtccggggcctaccgatacgcccagttccgagcgtgcggcattgataaagtcctgcactatcaagaagtatccggggaaacccatcgttttcatgatgtacaactcgaagttgagccgttctttcacttcttccgacaaagggtcgccatatattcttttcgcaccgtcaaatgctaactttgccagatagtcgccttcaagtttgatacgatacagtttctcatatccccccaaacgtttgatcttggcttgtccttcctcttcgctcagcaccacattaccattttcgtcctgtgtaaactcatcgaacaggtctttctccgtatatttggcacgatatccttcttctgttccgaagtcttcaggaatagcgaaggtaggcatgataggtgcatggtcaatcgaataatattcgactttatctagaatttccagcgtattgctcagtgcctcgggaacatctgcaaagagttcattcatctcttcacgggtcttcatccattcctgtttggtatatagcatacggctggggtcatccaagtctttacccgtactcaggcagatcaaacggtcgtgtgcctcggcattctcttcatccacaaagtggacgtcattggtgcagatcagcttgatattatacttccgggcatactcctgcaagtatttgttcacatttacctgtagcggataacattcgtgattggcacggggtacagtcgccttatggcgctgcatttccagatagtagtcatcaccaaacaggttcttataccattggatcgcttcttcggcttcggcaaactgccctgcggtaatacgcttcggcacctcgccacccagacacgccgagcagacaatcagaccttcgtgatacttctccagctcactgcggtcggtacgcggacgcatatagtacccgcgcgtccacgcgtgcgatactaatttaataaggttatgataacctttctcattcttggcaagtacaatcaagtgataaccgctttggtccggcttcccttctttcaagtccatcgtacggcgggcgacgtacatctcacaaccgataatcggtttaaagagcttgttctccgcctccacgatcttcgccttgcaggcagctacctccgcctccttatcctcacactccactgtgccggcttcaatccctgcaatccgctttttcagatccttaatttcccctttcggaccgctattcttcttattgacatagttcgtaaattccttgatgccgaacatatttccatgatcggtcacggcaatacccttcatcccatttttcatggctttatctaccagacgggcgacacttgcctgaccatccagtagagaatattgcgtatgaacgtgtaaatgaacgaaatcctgcataatgataagtagttaatttgaaggcataaaattactacctcccgcgttataaacaaaaataatcctcaaaaagttatcaacactcgcatttctctgctcatttacttgctgtttttttaaaataagtatatttttgcacacaatatcattaaacagcattcatgggccgactaaagaaattaaaaaagatacgtattcaccgcgaaggaacacatatattatgggctagctttctgctactgctactgattaatgcggccctttattggggaatagattgcaaaattcctttttatgtggttgcagtagccagtattgcagtatatctgctgatggttaacttcttccgctgtccgatccgacttttcggaaaggatacagaaaagatagtcgtcgctcctgctgacggcaaaatcgtagtcattgaagaagtggacgaaaacgaatacttccatgaccgccggttgatgatctctatcttcatgagcatcgttaacgtacatgccaactggtatccggtggacggcaccattaaaaaggtagcccaccacaacggtaacttcatgaaagcatggttgcctaaagccagtacggagaacgaacgttctaccgtagtcatagaaactccggaaggagtggaagtgctgacccgacaaatcgccggagccgtggcacgacgcattgtcacctacgcagaagtaggagaagaatgctatatcgacgaacacatgggctttatcaaattcggttcccgtgtggatgtatatctgcccctcggcacggaagtctgtgtcaacatgggacaattaacgaccggtaaccagacggttatcgccaaacttaaataattcggtcacaatgacaaatgttataaagaacaatattccgaatacagtaacctgcctgaaccttttctccggttgtatcgcttgtgtcatggctttcgaagcccgttatgacctagcactgctttttattgttctgagtgcagtcttcgattttttcgatggcatgctggctcgtattctcaatgcacactcaatcatcggaaaagacttggattcacttgcagatgatgtcagcttcggtgtggctccctcactgattgtattctccttatttaaagagatgtactatccggcaaatatggaatttcttgctccttacctgccatacgcagcctttttgatttccgtattctcagcgttacgactggctaaattcaataatgatacccggcagaccagttctttcgtaggtcttcctgttccggcaaacgccttattctggggatcgttcgtagtaggggcgcatgacttcctcgtttccgagaactgccatcctgtctaccttattttattggtttgtctgttttcgtggttgctggtgtcagagataccgatgttctcgctgaaattcaagaatctttcatggaatacaaataaaatcagtttcattttcttgattgtatgtatcccattccttgttttcttaggtatcagcagcttcgcagcgatcattgtctggtatattttactttcactttttacaagaaaaagtaaataaacaatctcttggcacgtttgttgtactatgagttttatcgaagttacaacataaaatcatagcccaatgcatatacttttattcttacttctttttctagctgccattgtcatatttggcctttcgattgtcggatttgtattaagagccattttcgggcttggccgtggttcgtcttcccggacgaagcaggcaaggagtggacaaaatggccagcagcaaggtcgtcccaactataaccagaacacggacagccgtgccgataacgaaggggaaatctttgctgaaaacagtccaagaaccaaacataagaaaatattcactcaggatgacggtgaatatgtagatttcgaggaagtaaaataatataatatagaaagtggttagtaacgtgtagtcagcaacttactaatcactgtttcatcttctcttagaagcgaaaaagtccttcatcaatgtggcacattcatctgcaaggatcccttttacaacgaccgttttaggatgcagcgcctgagccgcatatcgctgatatccacgcttatcatcttccgcaccaaaaaccagtttgccggtctgtgcccaagcaatggcaccggcacacatcacacagggttctactgtaacatacagcgtacactcgttcaggtactttccgccaagtacattggcggcagcagtgatagcctgcatttcagcatgggctgtcacatcattcaatgtttctgtcaggttatgggcacgggctatgatccgttctttgcagacaaccactgcccctacagggacttcgccccgctctgcagccttgccggcttctatcaatgcctgtttcatgaagtaagtatcgtccagcgtcatcatcagcgtctcatgtcatgttctccgaagagggtaggataatcttcttccatatttttatggataaacatgagaatggtttcgcgaagccagcgtgacttattcgttatcttgtatttttccagataacgatcgacaatcaactgctcgtcttcgctcaacaaaatgctcatccgccgttcccgtttggtatactcagcgtgcattttcaggcactttttgctcctttttctcatatcttctgcaaaattacttttacttctgtaaaaacaaagaataaaagctgtaaatttgcaaaaaaagatggctgaacacaatgaattagggaaagcaggagaaaatgccgcagtagcctatctcgaagagcatggttatcttatccgccaccggaactggagaaaaggtcacttcgaactggacatcgtagccgccaaagagaacgaattggtgatagtagaagtgaaaacacgcagtaacactttgtttgcccaaccggaagaagccgtcgatttaccaaagattaaacggacagtacgtgctgccgacgcatatatgaaactatttcagattgacgttccggtacgtttcgatatcatcactgtcattggcgagaacggaaatttcagaatagaccatataaaggaagctttttatcctcctttattttaataggaaacaagtattttaactaagagcaaaaacataaaatcgaaagacttatgaatgtagaaacgatcagggaatactgcttaagtaaaaaaggggttaccgaatcattcccgtttgatgatgtatcgctggttatgaaggtgatggacaaaatgtttgccctcatcgacttggaaggagccaactccatctcactgaaatgcgatccggaacgtgccatcgaactgcgcgaacattatgctggcattgaaggagcctaccatttcaacaaaaaatattggaatggcgtttacttcgatagagatgtagacgataaattaataaaggaactcgtcgatcattcttacgaggaagttatcaagaaattcactaagaaactgcgtgctgaatatgatgccctcccctgatatgtcatttcctgtcccattgattcacatcagtgagacaaattctacaaacagttatctgcaggctctttgttccaagcaacagggagttgcagcatttacgactgtagttgccgacttccagacatccggacgtgggcaacgtggcaattcgtgggaatctgaacccaaaaagaatcttcttttcagttttgttcttttcccggatttcttggaagcacgccggcagttcttgatttctcagattgtgtctttggctattaaagaggaactagatagctatgctgacgatttttccatcaaatggccgaatgatatctactggaaagacaaaaaaatatgtgggatgctgatcgaaaatgatttgatggggcgcaatatcagtcagagtatttccggaatcgggatcaatgtgaatcaggaagtattccatagtactgctccaaatccggtatcgctccggcaaatcacaggaaagcagtatgacattttcgaaattctcaagaatatcatgctccgcattcaatccggttatgaattgctccggaacggtgatactgaacccatagcccaccgatatgaaaaagctcttttcagaaaagaagggatgcatcggtataaagatgctgatggagagttctttgcgagaattatttgcgtagaacccgaagggaagctgattctggaagatgatgcgcagaaaaaaagaggatatatgtttaaagaggtagaatatttattgatataacacatacattctaaacaataaaacattacctttgagtttgctatataaaaaaacacctttaattttatgaagaaaatacagtatgtcaagttagttggtcttctgaccattttattattcctcaacatatcatgtaaagatgatgacactctactgcgaggtagtggaattacagaacaaagctggtctactaaccaaacatattttgcctcagcagagcaaaccctcacttttactttcacaaccttgtctagctggactgctcaaaacagttccactgcattattgtcattagacaataccgcaggaaattcaggggaaaataccataaaagttacagtacacaagtcttcccaggaacagggcaccattacgattaaagtaaatggatattcatctgccagcaatatcaaaatccagttgagcgatgatgatgtgcaaggttatgagataaactatagtgtggatcaatatttgagagaaaaatacttatggaatgatgattataagttattaacgcccaatttcagacaagcttatgatgagtttttgagaaacacattattaagcatgacaactaatacattagacaaaaaacgaaatagtaatggcacttattcattgttttcatttatccagaagctagatccggatttacaaacttcccgcagtgcaaaagagaaaaaaacactagagtataattatggattcgtaaactttatagccgttggaaaccgtaataattcaaattatggtcttgttatacaaggagtgcataaaggatcatctgctgataaagaaggactaaaacgaggaatggaaataaccgaaatagacaatcagagaataacaacgactaacgtgcaagcttgttactctaaattaattaaaccatcctctccaacctctataaaagtaaaagacaaagatggaaaagtatatacaataaattccggacctatttatgcgaacccgataattcaccaccaagtaaacgaaaagatcggctatctggtgtattcagcttttgagtccggcttcgaccaagaactattcgatgtattcaaagagtttaaaagtcagaatattacagagctaattttagatcttcgctacaatggcggaggagatgtaacatcggctaatcttatatccagctgcattgccggagatttatgcatagataaaacattcgcttcataccgatataacgatgaacgcatgaaggtccttggcaaccaacggcctattcagaaattcgcatattctcaatatgataatttgagtacttccctctctgccggtggtttaaatttacgaaaaatctactgtcttgttactgacgactctgcatctgcaagtgaattagtaatcaatgcactgagaggtattgatatcgaagttatccttattggcaccaccacacatgggaaaaatgtaggaatggaaggagtagaacttactgcaggaacagacaaatatttgcttttccctatcactttccaagcatacaatgccaaaggttttggagacttcgagaacggttttacacccgattacgagataaatgagaacaagcctaacggagaatattttgaaggatatggagactttggagctgaaagcgatcctttatatgccaaagcaatcagtctgatttcaggaaatgaagttactactcctacaagggcagttaaccaagctaaagaacaaatgctagtgatagctacaccaagattgaaccgtataggaatgataaaataagattattatatcccgttattaaatagaaagaggtgaaccgctcagcgattcacctctttctctatcctcaaaatcttatctaacgtcttctgagcctccgtcgatgggaaccgtagcactactttctgtaaagagcttcgtgctttctcatatccggtagcaaacaatttcgacaacccgtcccgataacgtgcatattgcatttttgtcggtgaagaaagctttttgtagtcactttccagttttttcttctcctgctccgccatcaaataataataattaccgagaaagatattggccgccagattatccgcatccaacttcaatatattctcgtacatacgcaacgcatccttctcctgtccacgacatacctgcatttcggcaacagcctccagataatctacattatcagggtccttctgcgacagttctttataaaacaaaaaggctttgtcataattccgattcttcttataggcaagagccaactcattagaaagtttcgagctgatctcactactcttgtctatactcgtccagtagaacatttccgagcggtctatattcagactgatagcctgacggaaatagctaaccgcctgtccatgctgtccggcctcaatagcaaccgtgactttatgcaacatttcatcggccgtctgtgcattcagcatcagcggcaacgaaaacaaagaaaaaagaaggagagttaaggttttcataatcagttacattgtttctagttcgtgacacgcaaagatacaataaaataataaaatatgtacctttgttcgcaaaaagaacaatctatttgataaaagtgtttctacaagatgataaataaaaagacgacctccgaaaacagacgaatattacagattgccgtaccatcgattatttcgaatattaccgtgccattgctgggacttatcgatgtcactatcgttggacatctcggctctccggcatatatcggagcgattgccgtaggaggaatgttgttcaatatcatctactggatcttcggattcctacgtatgggaacaagcggcatgacctcacaagcctacgggcagcatgacttaaacgaaatcaaccggttactgatacgttctgtcggcgtcggactctttattgccctatgcctgctgatccttcaatatcctatccttaatgcggcattcacactcatacagactacagaagaagtaaagcaactggcaactacctatttctatatctgtatttggggagctccggcaatgctaggtctttatggatttgcaggctggtttatcggaatgcagaactcacgcttcccgatgtatattgccatcacgcagaatattgtcaatattatcgccagtttgtctttcgtctatctcttggatatgaaagtggcaggagtcgccgccggaacccttatcgcacagtatgcaggtttctttatggccatactattgtatatgcgttattacagcacgctccgaaaacgtattgtatggaaagatatcatacagaagcaggcaatgtaccgtttcttccgggtaaaccgtgacatctttttccgtaccctctgcctggtaatcgtaacgatgttcttcacctctgcaggagctgcacagggagaagtcgttctggcagtaaatacactgctgatgcaattgttcacgctcttctcttatattatggatggattcgcctatgcaggggaagcgttagccggacgctatatcggcgcaagaaatcaaacggctctccgcaatacggtcaatcaccttttctattggggcatcggactttcggcagcattcacccttttatatgcaataggcggaaaagaatttctcgggttactgacaaatgatgtttcggtaataagctcctcagacacttacttttattgggcactcgccatcccattgacaggtttctccgctttcttatgggatggtgtgtttatcggcgccaccgccacccgccagatgctttattcgatgttggttgcttccgtcagcttttttatgatctactatgccttccacaatctcttgggaaatcacgctttatggctggctttcatcacttacctttcattgaggggaatcgtgcagaccttcatcggaagagaaatagtgaagaaagcgatataaaagttatcgcgcaactatgaggtctatccaacaaattatctctatatttgcgctaaactaaatgtaaaaagatatggcaaagtataaaagaattctgctgaagctcagcggagaaagcctgatgggggaaaaacaatacggcattgacgaaaaaagactggcggaatatgccgcacaaatcaaagaaatccatgaacagggagtacaaatcggcatcgttatcggcggcggaaatatcttccgtggactaagcggagccaacaagggcttcgaccgtgtgaaaggtgatcagatgggtatgctggcaactgtcatcaacagccttgcattaagttccgcattagtagcagccggagtaaaggcccgtgtacttacagcagtccgcatggagccgatcggtgaattctacagcaaatggaaagcgattgaatgcatggaaaacggtgaaatcgttatcatgtccggcggtacgggaaatcctttctttaccacagacactggctcttcactgcgcggcatcgaaatcgaagcagacgtaatgctgaaaggtacccgcgtagacggcatctacacagccgacccggagaaagaccctacagctacaaaattcagtgacatcacatacgatgaagtactgaaacgcggtctgaaagtgatggacctcacagctacctgtatgtgcaaggaaaacaacctgccgattgttgtttttgacatggacacggtaggaaacctcaaaaaagtaatcagcggagaagaaataggaacagtagtacacaactgatcctgactccctgccaatatacccggggccgactaaaaaggatataatcagctttcagactttttagtcagtcccgattactttctccctccacattccttttgttgacttgcatatacatcattaagaaataaaagctatgaaaaccaaaaacgcttgtttctggatattcttattactatccggaagtgcttacgcacaaatgtctcaaaaaggtacagtacagatttttaattcaaataagtccccactaccgggagtacaactgacagctaccgatgcccctgccaccgatacggatgccaacgggaatttccagttcaacttcagcaaacaaaaaccgggaatggctatcgcttctccgaatgtatataagaaaggatatgaactggtaaataaagacatgatcaatggatggattctatccgaaaaacgtccgttgagtattgtgatggctcccgagggcactatagaagaaagcaagagcaagtattattccatctccgttgcccacttttcgaagaaacaagaaaaagccattgaagaaatcaaccagctatatatagcacagaaaatcagtctgcaagagcgtagcgaccgtctgaaagcgatggcggaagaatccagatcatttatgaatcagatcgatcagtacgctgagaagtttgcgagaataaatccggatgacatcaacgccatcgagaagcaagtattggaactggtcaatgccgggaaactgtctgaagccatcgagctatacaacaaatccggaattatcactcaggccagagagaagctgttacagaaaacaaaagcagaggaagacatcgacaaactggccgaaataatgtaccgatatgccgacctctgcgccctgaccggaggaatggaaaacgagaagaaagcaaatgatgcctacaagttcgtagccgaagcacttcccgacaggtttacatacgtgtttaaatacgcattgcagaaaataggactagaagacagtgataccatggaatggctggacaaatgccagaaactttcatttgacgagaaatctctcgtacaagtactgaacataaaaagtacccttgcgcgtcatcatcagaaagactatatcaaagccttggagtatgacatcaacgcactggaaatactgtccaacaaaaatatttccatgccttcgggcgattactatgctatctaccatcagacgttctattcaatgggaaagacatacgaagccatgaacgaattcaaagaagcaaaggaaatctatgaagaccagatcaaagaaatcagtgaagagatagcagacagcgacaatcagctgttcataaatattcaaagttctcaacttgccaacatatacagttcgctgacagacatttacaagaaggaaggcaatgtgtctaaagtcaacgaactgtcagagaaattattcgagctaaataaaaagaatgcaggagataatgaagaagccatactcgaagctgaaataggaagacaagaatacctgttccatcaggcagtagagaaagcggattacaaactggcagccggcagtataaaagagattctggcaaaagccgagaaactgtataagatgcgtcccttgtcccgcgcctactggtatgctttatggaacttcgcctacatcagcgtaagcacagaaacagaaccggaaaacttcctcacgaccataaaagcatttgaagacaaggtagccaacgaattaaaaatcaacagtgaagaacaaaagacctcattattgtacaatatcgagaaacaatacattctatattactccaaaaacggaaataaacccgaagaaaggaagcatgtggaacaagcataccaatatgccgaaaaactgaatcagttgaatccggcaagatttgttcttgagattatcagtgcacaggcatcgtatatcgatatgctcctggaactttccgaacatgacaaagctctgaaagccgccatcgacctggaagcattatacaccatgcaaggagtatggggatttcaggacttgagaacagagaacagtataggcaccgcaatggtttgcggaggactgtatgaattaggagtggaacatctggaaaaagtaaagaaagacagggaaaagcacctgaaacaaaagccgaacgacgtggatatgatgggcagtatcaccactacctacaataacctgtcgttgggatacggcaaacttaaaaaatatgccaaagcactggaagtgcaaaagaaagcatacgaaatcatcaagacactgtatccgcataataaagcccaacttggcacgaactatctactgatgactctcaatacaagtatcgcctactatcagaacagcaataatgcggaggctctgaaatttctgcaagaggcggaaaacatcgcaaacgaactgaaagaactcaatcagcttttcagctcctaccctcttgttgtccggtttgccaaaggagaccttctggccaaattatcccagcccggctccgaggaattattaaaaactggtctggagtataagagcggcacgctgcctaacgatgccgttctgctctaccttatcaatgactaccggaccaacaataatagcatttacagaaagtaaaggcattactttctcagaataatcttccatgggactttatcggataccggtccggtgaagtcccataattgatatccatccttgtataccgtcacccgttgctcctctttttgtttctcggcaggtatgggcagttggaagtttcccattccgtcagataccgtcttcatgtccagcacttgaacagtagcatccgccagcggacggttatcctcatctttcacagtaccgaaaatcatcgctaatgaagaatcccgactgatgccaagagtcacattcttttccaggctcagtaccgtatctaccgtcacatatcctttcgattctatcttcagacgggcattctcacccagatatttagtatgaatttctttgaagacaacctcgtcagaaagtctgtccacatgacgggtttcgctcttatcggcatactccaatgttatatcagcgccataaaaaggcaaagaagatttggaagtatccgtaagacgcaccgtggaagtgaccggcgaataataatagaaagcaaagaaagccagtgccaccaccagtacaggcacaaggacatacaataatacgaacctcaatgtccgtttcacatctaccggatcgggcttgataaagccttcattctccaaaatctgcaattgtttgtcgaacttgagacgcaaatcatcataattggtatacaagtcgcagaagtgtccgagattcttctcgcaataagatttaaaatctttgagagactcatcaacgatcccttcctccttgaaatagacaaatattttaggttttgcagccttagtcttcagatatatttcatgggccacttccagttcttctttggtatagcgccccatccgtgtgtggaacagaaaaatcacaatatcacattcacggatatagtcattatagcgatcctgcagacggccttcattcagcgaactgctgaagtccatccacgtacgctggtcgaagtcgatattccgatcacgataaagcttattcttatccgaaaagtacaagtcaaacatctgtttgtcttcattcaactccgctgatgatgcaataaaaatcttgatcttcttcatctgtttctatattttttcctttatactgatccatttcttgcggtcttcgattcgttcgaaaaccaactgtgcctttttcttcagttctcctttcaacttgacttctttcaatgactgctgaaggctattctccaccagctcaatctcttgcatactttgcgtctcctttactatcaagctatactgatccagaacttcactcgggtcattccgctgaaagaaccactctaccgacattaatttcagcttgatatccgtcgccatctcataaatcaagtgagcaacagagtcacacgccactttatcatcggcttgcttcagcaactggaaattattgactaaggatggaagaagcagtttcatatcttcttttgcttcctgcctgactgcaatcttcaatgtcatggcagaatcaagtttcatctcttcataaagacgaatagctccatgcacatcaccatgatcgagcagttccattgcctgcttttccatagcatcaagctcgtcacgattgatgcaggcaaatttaagcgcatatatttccagacgtttctgccattccatcatacttttagacatggagtcaactttctgatcatattccactgcggacaatgcgttctgtttcttcagttcttccagttcagccaatgttttccgatattctttctcactattggattcacctatatcataatatttcttgcgcaacgcactgatgacttcggtacgccctaatacaattttcagttcggaggcagacgatatattccaattggctactttctcgtaattgactattttgaaacctttcttatagatatcattaatcatcaacggatcgcccggcaaggaagcggtgaaattcagtataaaccgcccttcctgatcgctgtccgtaggcgaagcacccgctacttttatttcagcaccggctacgggcttgttattgctactcatttccacgacgatccccttctgagtggtttgtgcccaaacacattgaaagccagtcagaaagatagaaagcactaagaatatttccttttgatgattccccatatcacaaatcctaatccattttatagttttccgtcctgcttcacaatcaaaagcagatgccgtgtcaaagcaatatcatatttctcactgccattccgcaaatcgttgtaagggcgaatgtcataatgagcatattcttcatcccgctttttattcttcaaggctgccttttgttctatctcttcctgttccttttttgtcacaggtctatatcccagtaacagttcttccacattccagcggttgtgttccacttctgccaaaatcgccacctgcttttcgctaagttgctttccgttgtcccaatgttccttggtgtagccgattgaacgcaatttggtaggaatggcattcgcattataaatattagaccatttctttaccgttttgaacttcggattgtgccatagttcgtccatttctttcgcagatggcagttctgtcaagactttatctccttcacacttttcatacaccgcatttacacgcttggcatacatctcgtctgccatgcacaagtcgaaacaatcatccaacatcccgaacggacgaagattcttgaaacgctgattggttcctccttttcccttcaacggattaccggataatttttcaatgatagccgatgttatccgttgctgaaccagcaccggaacacctttctcatagacacaacgcgggagatagacagcagaagaaatagactgatgagtcaggttcaggcagactgcaaccgtcatcagcgcatcctcatcttcacaccagcctgtaatcaaatcacggacttccggcgactcgatagttccctgtacaaactgccattctatgtctataaaatctgttcccaaatgagcatagacctcagcaggttcatccctgcggaccattccgttttctgtatctataaaggtagaataagatacatcaaacaggttttcatacgcttgtttgaagctgttcatctcacgcattgcttcattatcgataaaagtgatgcgcgttttcttctttttatcccggataaagttgggatagtgggctatatgggcagcctcgacagccagagcaattcccatcctcgacattcccacaattaccagatgcacatatttctctgattcgtaagtgacaggctgataatccagaggcagataattaatctcacggatactacacgcatttcgcacaaatactttttgcgcccatgtttcgtaaaagttaaacggacagaaatcaatatattcctttatatcatcatcaatatccgagaattggaagacagcaaaagtagattgatattcaaagagtacgttgcacttcaaaggaggtttccgattctcttccttgcaaagttcgcctatcagattcagacagtcgacattcatcgagtcatgataatattccacatcatccagctctccgctatctcccaatataaagacttctttcgcatccgccacatacaactttttcagttcttctttagagtctctcatggcatgaaccaaaacgattctcttctcctcatcctttgtgagattggaaaataattccatccgtacttcattgacgtctttggaagtctgaatgactaacgtgcaatccttctcccgttggcataactgtagtatcagacagggtaacatcgcatctgcaccgatgatcacaaaatgatcagatagtttataatgaatcaacccgtttctgcaattttccacccgcctttcaatgatattggaaagcgtggagatcaacaatccgcccaaaacgacggaacccagcaaactaataatcaatgcccacgggcggtcttccggacttatactaatcagattgcccgaatcaacaaagttattgtatacattccacagggtcttctggaaagaatggttcgccacagagtcggcagccagcgcagtcatctcttcggaaggagccatctgatgcttgcttccccagtgtactcccagacaagatagaacaatcagcgaaatgactataataatcaggaaacatatctgtttccaggccccgccataaataatccggtcaaaccaacgagcattcataacttactcctccctttctattctgaaacctaatttcttcaccatcttgatcgtattcatagccgtattccgatcgtactctttttcttcttccggcaactcatcataaggcaccagacaagggtgctttttatggatatcatcgcgttttccgccataagtccagccttcgtccatccgggcttttgcccacacttcatgtacattttcagcgatgcgctctgataattggattaaagattcgggaaggtcgaccgatgaaaggtccatcggttcgggggtgtaatccagtttattttctttcatattttatattctgtatttatctaatgtattaagatacaaggcatgtcattgatgcaaagataataaaaagactaagatttacagctttcaatactatttcttaatggctatagtgctaaaatctaagtctcgcattgcataaaactattcgtctgacagttgttgaactttcgtctgacaactgttaatctttcgtctaacagctgtcagacgaaaagaaaacagctgtcagacgaataaattcaagcataaacaatgttagtttacggctagcagaagagtaatctcatgctattctccaagtaatccgtcgcatacgaaaaattaaattatactatcaacgccctaaactattgtttatcatcggcaaactacgtacttttgcacgccatttttaagaggctaaaataatgaataacaagaccaaaggttttatttatggagccattgccgctgcaagctacggtatgaatcctctcttcacactcccgctctatgctgccggcatgagtgtcgatactgttttattctaccgttacgcatttgccgtaattgtattgggtgtcttgatgaagctgcaagggcagtcttttactcttcgcaaggcagacattctccccttggtaatcatgggattgctgttttcgttttcatctctgcttctattcatgagttacaactatatggatgccggtattgcttctaccattctgttcgtttatccggtgatggtagctgtgatcatgggcgcctttttcaaagagaagatttccgcaatcaccgttttttcgatcctgttggcactttcgggcattgccctgctctatcagggagatggcaacaaaccactctccaccgtaggaattatctttgttttactgtcgtctctctcctatgccatttatatcgtaggagtcaaccggtcttcattaaaaacattaccgactaccaaactgactttttatgctatattattcggattatcggtttacatagtccgcttgaatttctgcacggaattgcaaatcataccctctcccttattgtgggcagatgttctggccttggccattctccccactgccgtgtcattgatttgcaccgcattagccattcaatctataggctccactcctactgctatactcggtgctctggagcctgtgacagcgttatttttcggggtcctcctgtttcacgaaaaactgactccccgattaatggtcggtattttaatgattatcactgccgttacattgattatcatcggcaagtcgcttataaaaaagatgagtgtgctgttgcagataagcaaaaaatagtatacttttgctaatcaatcaaccaaatagcaactttaattatcaaaaaatatggtagacgtaaagacttgccttgacaatgcacaagaaaaaatggatatggctgtaatgtatctcgaagaagcattggcacatatccgcgctggaaaagcgagtacccgactgttggatggtatccgcgtagactcttacggaagtatggttcctatcagcaatgtagctgctttatccactccggatgctcgcagtatcaccatcaaaccgtgggacaaaagtatgttccgtgccatcgaaaaagccattatcgactctgaccttggcattatgcccgaaaataatggtgaagtaatccgtattggtattcctcctctgacggaagaacgtcgtagacagctcgctaaacagtgtaaagcggaaggcgaaactgccaaagtaagtgtacgcaacgctcgtcgcgatggcatcgacgcactgaaaaaagcagtaaaagacggactggcagaagacgagcagaagaatgcggaagccaagttacaaaaaatccatgataagtatatcaaacagattgaagatatgcttgctgacaaggataaagaaatcatgacggtttaatggaaaatggagaatggacaatggataattactatgcagtcccattgcccattctccattatccattatccattatccattaaataaatgaagggattagtaatcaagaacacgggcagttggtatcaggtgaagaccgacgacggacaatttattgaatgtaaaatcaaaggtaatttccggttaaaaggtattcgcagcaccaatccggtagccgtgggcgaccgcgttcagattatactcaatcaggaaggtactgcctttatcaatgaaatagaagacagaaagaactacatcatccgccgttcttccaatctttccaaacaatctcacattcttgccgctaacctcgatcaatgtatgttagtggttactgtcaactatcccgaaacatccaccatttttatcgaccgttttctcgcttctgccgaagcatatcgtgtacctgtcaaactggtatttaataaggtagatgcttataacgaggatgagctccgttatctggacgctcttattaatctgtatacgcatatcggttatccttgtttcaaggtttctgccaaggaaggaaccggagtggatgccatcaaaaaagacctggaaggcaagatcacacttttctccggtcattcgggagttggaaaatcgacgctcatcaacgccattttaccgggaaccaaagtaaaaaccggtgagatatcgacctatcacaacaaaggtatgcatacgactaccttctctgaaatgttctctgtagacggggatggatatattatcgatactccgggaatcaaaggattcggaacgttcgatatggaggaggaagaaatcgggcattatttccctgaaatattcaaggtttccgctgattgcaaatatggtaactgtacacatcggcatgagccgggatgtgcggtacgtgaggcagtggaaaagcatcttatcagtgagtctcgttatacttcttatctgaatatgctggaggataaggaggagggaaagtatcgggcggcatactaatctcttaactaatcagcaagaaattacacataaaaaataaatctaatttctattaaaaaaacgacaacaatcgaacattctgattccaaaattcaaacaacaaacacaactttgattttaatttaaacttcaagcaaaatctcactaatttaaataagtaaattagatgaaaagtcgaaattctccttttgtctgttattaaagccagacacaacattaactttcttttactttatccagcattaaaccttttctttcaagtgtcgtctaatcatcagaagatattatataacatgctatatactatactaaaccatgaataaaaaaactaaatggggcatcattattcttatcggtgccggaattatcggtgggggaatttactcacagttaccaaaaactaacgacgaactggctgctgctgacaaggtaaaaaatacccaaaagaatggaaaaaagattctgaacgtcaacgccaaagtaataaagcctcaactgttaacagacgaatacactactaccggcgtacttctgccggatgaagaagttgatttgtcttttgagacttccgggaaagtaatagagatcaacttcgaagaaggaactcccgtaaaaaaaggacaacttcttgccaaagtcaacgaccgccagctacaggcacaacttcaacggttggtttcacaactaaagttagctgaggaccgtgtattccgacaagatgctctgcttaaacgagatgcagtcagtaaagaagcttatgaacaagtaaagactgacctggcaactctaaatgctgatatagaaatagtaaaagcgaacattgccctaaccgagctccgtgctccatttgacggaatcatcggacttcggcaaatcagtgtcggttcatacgcttcgccgacaactatcgttgccaaactgacaaagattactccgctgaaagtagaattttcagtaccggaacgctatgcaagccagattaagaaaggtacgaacctgaattttagaattgaaggaaaactagatgccttcagcgcaaaagtatatgctgtagaatcaacgattgatcccaacctgcatcaatttacagcacgcgcactttatccaaataccaatcgcgccttacttcccggccgatatacaagtatccaattaaagaaagaagaaatcccgaatgcgattgccattccgacggaagctatcgtaccggagatgggaaaggataaagttttcttgtataaatcaggaaaagccgaacctgtagaagtgacaacaggcattcgtacagatgctgaagtacaaattgtaagaggacttcaagtaggagataccattcttacatcaggaacactgcaacttcgcctgggacttcctgttacattggataatattgactaatacctgccatgccttatgaatatatctgaattaagtatacgccgtccggtattagctacggtactgacaatcattattctcctttttggatttatcggatacagttatctgggtgtccgtgaatatccatcggtggacaacccgatcatttctgtcagttgttcttatccgggagccaatgccgacgtcattgagaaccagataaccgagccactggaacaaaatatcaatggtatcccgggcatccggtctctatccagcgtcagccagcagggacaaagccgtattacggtagaatttgaactttcagtcgatctggaaactgcagcaaatgacgtacgtgacaaagtttcccgtgcccaacgttatctgccccgggactgtgacccgccgactgtatcaaaagccgatgccgatgcgatgcctattttaatggttgccctccaaagcgacaaacgctcactgcttgaattaagtgagattgcagacttgactgtcaaagagcagttacagaccatctctgatgtaagtagtgtatctatttggggtgaaaagcgttattccatgcgcctttggctcgatccggtcaagatggcaggatatggcatcactccgattgatgtaaagaatgcggtagacaatgagaatgtcgaacttccttcgggtagtattgaaggaaacactaccgaactgacaatccgtacattgggattaatgcatactgccgatgagttcaataatcttattgtaaaagaagataacaaccgtatcgtccgtttcagtgacatcggacgtgcagaacttggtcctgccgacatcaagagttacatgaaaatgaacggtgtacccatggtaggtgttgttgttattccacagccgggagccaatcacatcgaaattgccgatgctgtgtacaaacgcatggaacagatgaagaaggacctgccggaagatgtgacgtatagctatggttttgataataccaaatttatccgggcatctatcaatgaggtaaaagagactgtatatgtagcctttattctggttatcatcatcatcttccttttcttacgcgactggcgggtgacgctggttccgtgcatcgtaattcccgtatcgctgattggagcattcttcgtcatgtatcttgccggattctccattaacgtactttccatgcttgccattgtgctggccgtgggactggtggtggatgacgccatcgtaatgacggagaacatctatatccgtatcgaaaaaggaatgagtccgaaagaagcgggaatagaaggagccaaagagatcttctttgccgttatttcaacgaccatcacactagttgcagtattcttcccgattgtctttatgcaaggtatgacaggacgtttgttccgggaattcagtattgtaatttccggttctgtcattatctcttcatttgcggcactgactttcacaccgatgctggccacgaagttactcatcaaacgtgagaaacaaaactggttctacactaaaacagaaccgttttttgaagggatgaaccgatggtacagccgttcgctcgctgcttttttgcgcaagcgctggctggcacttccgttcacttttataaccatctgcctgatcggcttcttatggaatgctattccggcagaaatggcaccgcttgaagaccggtcgcaaatctcgatcaacacccgaggtgcggagggtgtcacttatgaatatatccgggactataccgaagatatcaaccagcttgtagattctattctgccggatgcggaagcggtgacagcacgtgtatccagtggtagcggaaacgtacgcattacactgaaagacatgaaagaccgtgactacacgcagatggaagttgcggaaaagatatcaaaggcagttcagaaaaagaccatggcacgctcgttcgtacaacagcagtcttctttcggcggacgccggggaagtatgcctgttcaatacgtacttcaggctaccaatcttgaaaaactgcaggaggtattaccgcagttcatggccaaagtatatgagaatccggttttccagatggcagacgtagacttgaagttcagcaaaccggaagcccgcatcaagatcaaccgtgacaaagcaagtgtaatgggagtcagtaccaaaaacatcgcccaaacgctgcaatacggattgagcggccagcgtatgggatatttctatatgaacggaaagcagtatgaaattttgggtgaaatcaaccgccagcaacgaaacaagcctgccgacctgaaagctatctacatccgcagcagcaatggagatatgatacagctggataatctgattgagctggaaaacggtatcgctccacccaaactgtaccgctacaaccgatttgtatcagccacaatttccgccggactggctgacggaaagaccatcggacaaggactggatgaaatggacaagattgccaaagaaacattggatgatactttccgtaccgcattatccggagactccaaggaataccgtgaaagttcttcgagcctgatgtttgcctttattttggctatccttctgatttatctgatcctggcagcacagtttgaaagtttcaaggacccgttaataatcatgttaacagtgcctttggctatcgccggagccttggtattcatgtatttcggagatatcacaatgaatattttcagccagatcggtattatcatgctgattggtctcgtggctaaaaacggtatcctgatcgtggaattcgccaatcagaaacaagaagcaggcgaggataaaatgagcgccatcaaagatgccgcattacagcgtctgcgcccgattctaatgacaagtgcttctactgtactgggacttattccattggcatttgccagcggagaaggcgccaatcagcgtatcgccatgggtacggctgtagtaggtggtatggttgtttccacactgcttactatgtatatcgtgccggccatctacagttatatttcgactaaccgaatcaaaataacaaaagaatgaaacagaaaagtatttgcatgaaacaaatcatatacatagttaccgcatgtgtcttcgtattagtttctccagtgaaggcacagcgaatctattccttaaaagactgcctggaagaagggctgcaaaacaattattctctgcgcatcgtccataacgaagaacagatcagcaagaataacgcgacactcggaaatgcaggttatctgcctactttggacttttctgccggatataccggaaacctggacaacatcgagacgaaagcccgtgccaccggagaggtcaccaaaaataatggagtctacgaccagacagttaacgtcggcctcaacctcaactggaccatcttcgacggattcaatatcagcactacgtacaagcaactaaaggaactggaacggcagggcgaaatcaatacccgcattgccattgaagacttcatcgccgatcttgcctcggaatactacaacttcatccagcaaaagatccgtttgaagaactttcattatgcgatgtcactttccaaagaacgcttgcgtatagcagaagcgagccatcttgtcggtaaattctcaggtttggattatcagcaagccaaagtggacttcaatgcggacagtgcccaatacatcaagcaacaggaattgctgcactcctcacgcatccaacttaatgaattgatggccaacaataatgtaaatcagattatcgtcatcaaagattctaccattgacgtacacagtgacttactgttcgacgatttatggaatgctaccttatccaccaatgcttctttgctgaaagccgaccagaacaccgtactggcacagctggattacaaaaagatcaactcccgcaactatccatacctcaaactgaataccggctatggatatacctttaataagtatgatatcaatgcaaatagcagaagaggcaacttaggctttaatgccggagttactgtcggttttaatatcttcgacggcaaccgccgccgtgaaaagcgcaacgcaacccttgccttcaagaatcgtcgtttggaacgacaggaactggagttagcccttcgttccgatctcagcaacttgtggcaagcataccgtaataatcttcagctgctgaatctggaacggcagaatcttgtgactgccaaagacaatcatgatatcgccatggaccgttatatacagggagacctttccggttttgaagtacgcgaggcacaaaagagtctgctggatgccgaagaacgtattctctcggcagaatacaacaccaaactttgcgaaatttcactactgcaaatcagcggaaaaatcaccaaatatctggagcaataaaacattgattctcctgttttcattgggctaatcatctgataaaagcgattagcccaatttttatgccattaagaacagatattacccttcattcccgaccttttcttctacatttgcacacaccataacattcacttaacaatagaagtcatgagacaaacagcctttttctttctgttacttttcattcagaccggagtttcagcccaaacaacagattacaggaaacaacagaattacaaagaatgggtacacctcgctcccaagttcaatgatgcctttttccggacagaagaagcacaacgcatcggagacaatgtattattgtatcagcaagtcacgggaggctggcccaaaaacatttacatgccggcagaactgacagagcaggaatacaccaaagcatggaatgcgaaaggagacgtcaaccaaagtaccattgacaacaacgccacgacaaccgaaattcaatatctggcccgtctttatcaagctacacaaaaagagaaatacaaagaaggagtactgaaaggtatccaatatctgctcaaagcacaatatgacaatggcggatggcctcagttttatccgcgtcctacaggatactatatccaaatcacctacaatgataacgcaatggtcagagtcatgcagcagttacgggaaatctacgaaaagcagtccccttatactttcatccccgatgaaacctgccagcaagcacgtaaagcctttgacaaaggaatagaatgtatcctccggacacaggttcgccaaaacggggaactgacagtatggtgcgcgcagcatgaccgcatcacactggagccctgcaaggcacgtgcatatgagttgccttcattgagcggacaagaatctgacaatatcgtgcttttgctcatgtctctcccccatccatcggaaaaagtaattgaatcgatagaatcagccgtcaaatggttcaagaagtccgaaataaaaggaatacaaaaagaatacttcaccaacagtgacggaaaaagagattaccagatgatcccttgcgaagattgtcccgtactatgggcacgtttttatgaactggacaccaatcgtcctttcttctccgaccgcgacggaattaaaaaatacgatatctcagaaatcggacatgaacgccggaacgggtatagctggtacaataaagacggcagcaaagtactggcaaaatatgagaaatggaaaaagcaattaaataggaaataataccggaggatgcgataagaggggctttcaaaagtcaatagtaactaaactctcctccttcaggaaggaggagtacccgtagggggaggtggtaggtgaatacataagctattgatattcagcgatgcaattaacctaccaccccggctttcagccacccctccttcttgaagctaccctttatacacaagtcttatctgataaactcatacagttcaaactgtgtataaaatctatccagtccattcttaaaggttatatatcctggaatggactggctcttgtatgcactccatgctcctaaccttgcaataatccatgctgcccatgccattgattcttttttatatggattttgctgtatttttgtatttccctcactcttttttcctactatatgtaataatgctatttctttgcttgtaaagtagatttctgaagagagtttttcatcttctttatcaaaagaaagtttgagtaccatcacctgcagggctgcctgcaaggaaattaagattagtttttgtaatgccgaaactgtttccaactgtgcgtcctcaatcatgaatccctttcttttgagcactctgaacaactcttcaatcagccatctacaacgataccaaccgatacattcaattgcttgttctacagtctccaccacatgtgtagttagcagtctccattcaatagggctctcatttaccggtgtactggaagatttttctttaacatgtatgcaataaagactaacagggggactgccctttgccggaccgttaacaggagcgcacaaagtgactctttcaaagcgaagttccatgcacgctacccgtttcttacgtccgcttcccgggagcacttcaaagctatactctgcccgtagaacagcctgctccattaatgtattcagatggacagaacagtctggatcatccaaccggcaattcctttcatgaacagaacgtatcagcaagtgaacattatcagtagggatacggctgaaaagctcgaaaatgtccgcttcacggtcaccgatgatcgttttaactgcatcccggggcatttgctcactggcagccattccactttctatccaacgatatgactctttttcttctataggctgatatctgtaattacgttcttcacgacttaaagcagccggtgagcgattccactgcttaaccgaagaaaagcctataggaatatgactggaggcatccactaccaagacaggatgcaaaaaagtaccacattgcttttgaccgacaatgccgggactggctgtttttttcttcattcgctcaacatgagcctcatagtttatctccgaggtatcttgaatacacagtaaatgcttacgaccggaagcattcttacagcaagtgtgtatcagacctgataagatagcatcagagctgactgaggaattgttcaaaaatctataagcacccatcttttctttatgttccttactaaattgattcactatagcactttgatggacaaccatctgagagcaaattaagtttaaacgccgcaaaagccgaggatcacgaatttgatctgtctctaataacatcaagcaaagataaaaaaaataatatatacttgtgtataaagggtagcttcttgaaggaggggaatttagttactattgacttttgaaagcctctttcctatttctattttctatgactatcctactatatatttagcaacctttcctgcacgatagatcagccataccaatccccaggaaacagcgaaagcaagaatagcggctacaggtatctgcaaaccaatcggcatatcaatagctctcatcagcacgaccgacggccctgtaaagaaataatgtatcatataaataccgaatccgcatacagtgagattcgccaatgcctttttcatcctttccgagttcactttcactttctttgccaacataaacacaggtatcgtcatcattacaacattaagagaacaatacgtaaagaagagttccagcatctcatccgtatattccggcaatgcagttatatgtctgaaacctaagaatgtcaccgcataaccggctgcaaacatcggaatgccaatcgccaacgtttttttcaagctccattccagattcttcagataatgtcccaacaacagatagccattgaaaccggcaaaagcatacagcattccaaaagagttccatgaacaggttccccataaataattagaaacaaactggtaataataaggaagcagcaaagttaccccccaagccagcagaaacattagtttggcacgttccgaagccttctctacccaagctgagaaaaccggcaaatacagatacagcccgattagcagataaatataccacatatgcacagctaagatggagaagttgaacggaatcatcaaaatatattccaaagatacagagaatgattgctgcatcacttcctctcccgcatacgggaagaaatcaagaataatctgaggattcagtcccaacagacctgtaatccaagggaacagattatagagcaccgaccatatcaggaacggataaaagacacggggaatacgtttcttgtaaaaagtagaagcatcacctcttacaggcagaagcaatgcaccggtaatcatcacaaacagaggcacacacggacgcagtacagatccgtagatagcaccccaaagttttatttctccgatattcggagccgtgccgggataaaaattaaacggatcggtgcaatgacagcagacaactgtaaacatcgcaataaaacgaacgacatccagccagacaatatgctggttcttttgattggataaattcatcacaggtggtttcatggtgttttaattattagataagcaagtttataaaaaaagggatacccatacgaaaactgacaggtatcccaaatgaatgtttatgtaatcaaccgcaagaattacttgccattacttattacttgttacttattacttgttatttgttatttggcacaacgtggtttaatctgtttgaagaagtcatttcctttgtcatctaccagaataaatgccgggaaatcttccacttcaatcttccagattgcttccatgcccagttccggatactctacgcattcaatgctcttgatgttgttctgagcaaggattgcagccggtccgccgatagaacccaaatagaagccgccatatttctgacaagcatctgtaacctgctggctacggttacctttcgccaacataaccatgctgccaccgtggctctggaacagctcaacatacgagtccatacgtccggcagttgtcgggcccattgaaccgcaagccataccagccggagtcttggccggaccagcatagtaaataggatgatccttgatatactgaggcaaatcttctccacgatccagacgttctttcagtttagcgtgagcgatatcacggccaacgatgatagtaccgttcagtgacagacgagtagatacaggatatttggtcagttctttcagaatctcagccatcggacggttcagatcaatcttcacgacatcaccttcaccagcctgacgcaattctgccggaatcaggctacccggatttgaatccagtttctcaatccagataccatctttattgattttacatttgatgttacggtcggcagaacaagacacgcccagacctaccggacaagaagcaccgtgacgaggcagacgaatgatacgaacatcatgtgccagatatttaccgccgaattgtgcacccagaccgatcttgtgagcttcttccagtacttgtttttccagttcgatatcacggaaagcacggccaaattcatttcccgtagtcggcagattatcgtagaagtgagtagacgccagtttcactgtcagcaggttcttctcagcagaagtaccgccgatcacaaaagcaatatgataaggaggacaagcggcagttcccagagtcttcattttttccaccaggaacggaaccagtgtaccggggttcaaaattgcttttgtttcctgatacagatatgttttgttggcagaaccaccacctttcgttacgcagaggaattcgtattccatgccttcggtagcttcgatgtcaatctgtgcaggcaggttacattttgtatttacctcatcatacatattcagaggcgcattctgagagtaacgcaagttttcttcagtatatgtcttgtaaacacccagtgacagagcttcctcatcggtatagccggtccatacctgctgtcccttttcaccgtggataatagcagtaccggtatcctgacagaatggaagtacccctttggcagccacttccgcattacgcaggaaagtcagtgctacgtacttatcgttctcgctggcttccggatcgctcagaatcttagcaacctgttcgttgtgcgaacggcgaagcatgaatgacacatcacgaaaagctgcatttgccatcgcagtcaagccttctttttcaattttcaggataggatttccttcaaactcgcttaccgatacatagtcttttgtaagcagataatactcagtggtatcttttcccttttcaaacatgggctgatacttaaacggaggtgttgccataatctcttattttattacgtaatgttagttagtgaggcaaaggtagtaattaaaaataaagaatgataacggaagaatgaagaattaagaatgaataacgcagaaaggaactatgcccaccgcaacaagaatttattctcattgcagtgagaactttttctcatacctatgagtattttttctcactgcgatgagaaaattttctcattgtggtgagaattttttctcatcgatatgagaatggtctgagaactttatatcacaataactactgttaatgaggcaactagccaataagccggctttagattttactcttgaatggacccgattcttttgatcaattcattgccaagcgcagttttgtcctcaatatgcttcaagacagccgtcacaaacgtgttactttcaaaatcaccacgtacttgttcaaagtcctgcttcatttcatcgtgagaaccgtcggctccgaatcctgtcatcgaagacagcgagaactctttgcgggcatcatcatataccattttatcaaggccgactaccgcctctttccacgcttttacgatacggattatgtcttgtgccgttatttcgtccggattcaagccgtaaaactcctgaatcttgttgtaagcccaggtccactcatacgtataataattctcatgcatttccgcaaagctggcgttgatggacttcaaccggttgacagaaccgttttcgatgccatcgagcagacggtctatttcactcttaggagcgatcagtccggacatatccacccattcgccggtaccgatttccgtgtccggtttcagacgctggcgtatttcttcgttactttggaaattaatgccttccaggcgttttatgatggagttacccaaaaacttatgaatagcgatctcataaaaacggataccattatttaaagaggagttcttgatctttgcgctctgataggaatagatttcagatgtttcgccggatacccgcctaagctctttcagaatagaacgtcccttgaacattttctgaatggtgtatggactcagaagattgtaattgatataatccaatcggttcgggtctttccgtttgtcacgtttcggccacttctgagcatcgcgaatggtacccacacttctcagattcactcccggaaccagataagtcgtgttccgttgctcgatcagataagagaaaggaagattggaggtatcggcatgattaacgtggcgtcccattaccagagaaaaggctccgacacgtgccggccataagatataggagtcggaggtcgttttggctcctctttccatggttccctgatggataggccccagtttatacatatggttgctctgattcgatcccgatcccgcattcataaacgagaacataccggcaatcaataaagtcgatttgtggtgagtcaccgtgaaaggtcccgcaaagatggcgcatgcctccccgttctctccctggcagttactgaaaaacaaggaatcggaggctgaatagttatgtcccagtttgcaagactgaccgacaaaacaacgggtcagcatcgttccgtcatctacttcggaaccggaagagataatgaaatcatcacatattactccatgcccgatatgcactggcgctgtcacattactgttgacgctaccgtttgtcaaacggcaagtaccgcagatatggcaataatcaccgatccgtacattcttgatagaccctgtgttcagaatcatcacatgatcacctatactacctaccgcagaagcatgcttgttggaataataatcggcaatcgccttcatgcgattaatcagttccggacggtgacgatacaatgcaagtatgtacgcctgatgtgccgacagtttatcattgatcagcacttcacgtccgcccgtttcattgagcactgtcgcttccaccccattaccaaaggtgcttagcccgtctaccaaaatgatatccacattttcaatgaaggtatcatttccgatttcataattagcaatgtagttttgaatgttttcaatgcagcagttatcccctactaccacattgtgcagagttacatgacggagtcccgaatgttttctgatccctccgggcagtgtaaattcggcatcaaatacacccaacttcacttcacccgaaaagcgggtatggtgaacatactcacagttaaacccctcggcaaccaaaacatttccccaatcatcagccagacacgactggctcttcaactgaagcacttcgtcctcagtcaatttacgatagtctttcatatagataaaaatagatatgtaccgcctcccccaatcagtaagcggtacattgattattattcttcctcttcgtaagtctgataaagaaaatcgttataggggtacttttgaacatgcaattctttcactcgctgataaactacatctttcagttcgtctatattgattcgttcgcgggcggaaataaagaggcagttgtcctccatctttgccatccacgtcttcatcagttcttcgagtgttaagttttcctttgttcggggggtaaggtcgtccggcgccttctccacgtaggtgtaggcgtctattttattgaatataagtatcatgggtttgccaccgccgccaatgtcggcaagtgtcctgttcaccacttcgatctgctcttcgaatccggggtgagagatgtctactacatgcaccagtaaatcggcttcacgtacctcatccaaagtcgatttgaatgagtctaccagatcagtgggcaacttacggataaatccgactgtgtccgacagaagaaacggcaggttatcgataatcactttgcgtaccgttgtatcgagcgtagcgaacagcttgttttcggcaaacacttcgctctttgacagcaagttcatgatggtcgattttccaacgtttgtatagccgaccaatgcgacacggatcatgcgtccgcggttcttgcgctgtgtggctttctgtttgtctatttccgccagacgttctttcaacagtgacatacggttgaggataatacggcggtccatttcgagctgcgtttcacccggtccgcgaagtcccacagaacctcctttaccgcttccgctaccagagccaccaccctgacgttccaagtgggtccagagtcgttgcaaacgtggtaacatgtatttgtactgagccagttccacctgcgttttcgcattggcagtctgtgcacgcatcgcaaatatatcgaggatcaatgaagtacggtctagtatctttactttcagttcggcttcaatgttacgtatttgttttgcggaaagttcatcatcaaagatgaccattcccacttcacgttcttcttcctcttctgtccgtatatattgtctgatctcttccagttttccttttccgacataagtaaccgaattggctgtcggcaatttctgtgtaaatcgtttcactacctccgccccagccgtctcagcaaggaaagccaattcatccagatactcgttcgttttccgctcatcctgcatctgcgtaatgagtccgacaagtactgcggtttctactttggcttcggatattataaattctttcattctttaacttctactatataaatctaaatatggtcgcaaatataacaaaaaaaaagaggacaatgttgtattgtcctctttttcgtaaccatttataataattcaattataaatcaaaccataacttttcccaaattttcggagattctttcggtgcattgatattagcagtcatctcttcagggctatactcccatcttctgatcagttcttttgaagttgcatcttccggcacttgcaaggtcgggacttcatttccagcagtaccggaacgtctccactgtacaaactcctcgaacggacgatccattaaatcaatccactgctgcatatgaatctcatacagtgctttctcctgagtcagcgctgtcaattccggcaaacctgtaacatatgtattgatgtccgcttccgctactccatagaatgcacatgcttcccgaatgccttttttgtacagctcattagcttttgacaaatcctgagcaactcccaagccgcgagcataagcctccgcttctaaaagcagctgctcctgagatgaataaatcagctccggcgcatctcttctgaaaagataattgcttacaacagatgacagcatactacctttgtcatcagtaacagcaggttcacgattacctaaacctctgtatactccatctgcacccggctcaaaataacgggaaatacgagggtcattacgctcttgcatgggttgcagcatataattgctggcaaagaataagatctgcgttccaccaaccaactcaataagttcatacttaggattctgattacccggatctgtagaataagggaacactaaattgtctgaagatgacgaaaccattcctccagcctgcaataacgaaccgatagcagaagccttggaaggatctttatccaccatcaccatcagtgttctgaactttaatgattttgccagagtcatccatttattcatatcacccttatagtaaatgtcatactcatcgatcgcattagcatcatttaagtcgatagtctgcaatgcctcatcaagtaatgacagaacgccattcaatatactctcctgagaatcaaatttcggatatttgattgttgcattccaggattcagtgaaaggtatatctccccacagcatcgttgcctcatacatatgttcagccaacagaatcttacactgtgcaatagcattatgattcaccgggtctgcttcttctgcatttttaatagccagcatcaaattattaccaccgactgaataataatgtttccacgtatttcccgtactataaggagaaatggtatataccgattcatcccagccaccataatcaagtccaccatcaacctgacactgagagctcattgacaaaggtatgtagaagtcgccaccagtacgtgttccggcccagtttacggctgcatagttaaacaaatatccgggatcaactttctcggctgtattgggatcatggttgatatcgagccagtcgctgcatgaagtaaataacccacatgtcaaagcgctcaatgcatatgctaatattttctttttcataatcatgttcatttaattcttacaatgttagtctgagattaaatccgaaacttctggtagaagggatactgttaaattctacaccgcctccaatctgagaaggaccgaagaagttagcttccggatcaatatggggcacatgatctttaataatccataggttacgtgcctcgaaacctaaatccaatgatttaacaaagaaactcttaaaccatttgcgtgggaagctataagacagttgtacctctctaagctttacaaatgatgcattatagatatttccttcattattgctggagttggctgtatgctgccagtaatcctgcatactcttcaccggaacatcatttggcttataagttccgtcagcctgaagaattacgcccggttcaataaaagaggcatcttcacggtgagccaatgtctcggctgccagtccgctgcttctcaaattagcaatcgtttctgaatacaaagaacctccctgacgaatatcaatcaagaaactaaaagtcacccctttataggtaaatgtattgttgatacccatggtaaagtcaggataaacatctcccaggcgtacgttattgacagtttctctcaaacctgttttagagttgatcacgtagttaccttggtcatcacgtttccaagctgtaccatacaaaccaaaggaatcacccttagcagctttaacctgcaaaccgctcaatccgcttgttaacgtgtattcatcaagtccttcggctaattcttctacagtctgcttattagaagcaaacgttgcatccaaatcccatttaaagttacgtgtttctacaggtgtcaaacctaaagttacttcgacacctttattagcaatctttccagcgttgatattgttggcaaaataacctgttgacaatgggacatcgatacttacaatttgattctttgttatattactatagtatgtcatatccaaacgaatctttccaccaaagaagcgcagatctgctccaacttcaaatgagctttgattctgaggcttcaaattttcattcggcaatacacgaggaccagtaaaaccaaccaatcccatatgtgggaaggtatttacattgcccagatattgcaggaagtaagtactggctggagtatacttaaatgccaagttgtatggatcttcatcactacccacattagcatagcttaaacgaatcttaccataattcagtatatccttattcttcatcaactctgtgaagataaaactaccactgatggaaggatagaaataagaacgattatttatcggcaaagtagatgaccagtcattacgtcctgttacatttacgaaaagcatatctttatatgccaggctaatatctccatatacaccgacaagacgtttcttctcagaataatttaccggagtagtggacttcgcatttgtgtatgtgtatagttcgtcgactaccagattctgagcctgtacattctcattcttccattcttcctgatagatgttatgacccaccattactttaaaatgataatcattggcaaacgtcttctcgtaagtagccattaaatcattgttgatgattctcttatacagattccaagtctggaactttccgtttaaagcccccacagtacccttcgcataaactttacgtcttccttccgtgtagaaatcagttccggcattgttagtgatagtcaatccttcgatcggtttataagtcaacatgatgttaccaatcatacggtccagattattagtaaacttattcttattaataatccagtacgggttattacttttgccttccggatccaacgtaacctgtttgccgttttcatccatccagttctgcttaatatcatgaatgtcaatggttcttggcagtccattgatcaaaggaatcagcaagttgctatcatttgctccctgtgccgggcgaccttcagaatctgaacgtatatattgggcagagatacgtccagtaaagttgctagtaaagttcatacctgcattcacagagaaagcatatttgttatagtcagagcctggtacaacaccagtctgattagtggaagtaaagctcaaacggaaatcggctttttcaccacctccggctactgacacattattaatatagctcattccggtttcatagaaatccttcacattatcaggatttgctttcaaggtcactttatctcctttataatctgtaaattgctgatcttgtaccgatgaaatcttcggtccccatccattcagcatttttacattatatactccgtagctaccttgtgcatactcattctggaaatcaggcaatttaagtacattctcaaatcgtgttgaagagtttaccgtaacaaataccggtgaattcttcttccctttcttagtagtaataacaattgcaccgtcttttgcacgtgctccatacaatgcagttgcagctgcacccttcaatacgttaatagattcaatatcgtcagagttgatatctcctgcacggttacctacatcgactataccattggttctgtcaggattgtaagaaccattgtcaataggaagtccgtcaataataaataaaggggaagaaactgtgccaatagaggaagcaccacgaatctgtatacttgaactaccacctaccgttccagacgactgtgcaatttgcaaacctgcaatcttaccggacaatgaattaagcacattactttcacgcgctttagttatctcatctccttttacactggatactgcataacctaaagatttttcagatcgcttaatacccatagctgttaccactacctcttcaagattctgagaatcagactttaacaaaactttcaaagtaggtttgattacgacttcttgtgtttgcataccaatatacgaaatctgcaaagtctttgcagaacttggtacgttcgccaaattaaaattaccatcgatgtctgtgattgtaccttgagtagtaccttttaccaacacagaggctccaacaactggttgcccatcttcttcagaaatcacaacgcctgtgactttctgagtctgagcagttactaggcttatgcccacaaaaaggcatgccaataacagcattaattttcttttcataaattctctcttaaagttcaactttacattaattgtctctatactctaacaagttgcaaaattattaataaatatgaaactaacaattaatttgataaaaaaaggttgtatatataacatattgttatttataacatcgaaaatatgctgataaacatctttatttgctataaatattgtgatttatcaagcatggaatgtcactttgtgaatgcaaagtgtagtaattaacattctatttgcttgtttttggatataaaactaccctgcaaacgtttctttttgatttattatgaagaaatgacgataaaaaaatagcatttaaattaaagttatgtaaatacttaattattgaattttaatttttgcagaaattaatgcaggttcaaccttaattataggacagaacttagtttattttgttcttagtattaactaaaagacaatagaatgaagaagattagttacagccttgtgtttaacagaaaaaagaagctgaacaaaaaaggaatggcattggtacaagtagaagcttacttaaacaggagaaaaatgtacttctcaaccagggtatacctcaaaccagaccagtgggacgtaaaacgtagaatggtaaagaaccatcctaattcagatgcattaaatcgaatgctatatgattttatagctgacattgagcagaaagaactgggattatggcaacagagaagatcgatatccttggattcgttgaaagactctattgaaaaaccggaaaataatgggaattcatttctgaccttttttaaagaggaagtcagcaactcttctttaaaagagagcaccaggcagaatcatctttccactttagaattgctgcaagagtataaaaaggacattgtattcactgatttgacattcgaatttgtgtcttcatttgataattatctgcagtccaaggggtatcatctcaataccattgccaagcatatgaagcatttaaaacgatatgtgaatgtagctataaataaagagtatatggatattcagaagtatgctttcagaaaatataaaatcaaaagcatagaaggaagtcatacgcacttgtcgccggaagagctgaataaaatggaggaggtgaatctggaagggaagtttacgaagttacaaaagtcaaaagatgcctttttattttgttgttacgccggtttgcggtactctgattttataaatctgactgccgcgaatattgtcgaactccatcaggagacgtggctgatttacaaatctgttaaaacaggtattgatgtgcgccttcctttatatttattatttgaaggtaaaggactgcgggtgttggagaactacaaagacgatttaaacggattcttcaagctgaaagataactctaatgtgaataaagacttgaatgcattagccaagctggcagaaatagacaaacggatatcattccatacagcccgacatacaaacgccaccttattgatatatagtggtgcaaatataacgactgtacaaaagctgctgggacacaaaagtgtgaagacaactcaggtatatgcaaatatcatggacatgactattgtgcatgaccttgagaaagcagcctattcaaaattagctaatagaccaaaaagctaggcagtgattgtctggaaatgtcctgtttttaagattggtttcaacagagttgattcaaaatctaacaatatggcagaaataatgcataaatcaatgtaagaatatgcaatttataaatgatttgtcgcatataaatgactgtaatatacataaaaagtgcaatgtcaggactctttccttttaaaggaacgatccgttcctttaaaaggaacagatcgttactcaccgaggaacatctaattgctttaaaaggaagagccaaaagtagttttaatttctaattctgttctaactgatagactttcctgtcacagggaaatatatcatatcgaaactaaatatttcttttatattcaaaggtgcaagctgatataagtaatcatatagcacaaggaaacaaaaaacggacagatgtatttcatccgtagatctgctgttttaaaatcctgccgatttttgtcattctcccaagcaggttctgcatattttgaattatactataactaaatatgcttttcttcagatttgatctttttctattatcacgccccaaaagtaatcattcattatgattggtggtgagaaatattcgggaaatataaaaatagtatccaataataatacctcatataaataaaataaagacataactttcttataatgaatgaactaaatgattgaaatggatagaaacagggtatcattcgttaaagaaaagggtagttataatgctgataaataattgattatcacgtttatatatggatacaataacatatatgacgattaggtttatatttctcattattataataatcaacactttatataaagaattagttctgcaaagactttgcaaatttcgtacatcggtatgcaaactcaagaagtagcgattaagcctaatttaaaggtagtacttaggtcggatgctcaacagatcgatgaagttgttgttacagcaatgggtattaaaagatctgaaaaagcattaggttatgctgcaacttcagtgggtggagaaaaaattgcggaaagccgtacatctgatgtgatgtcaagcttggcaggtaagattgcaggtgtacagatttccagcacttcatctgaccccggagcctctaattcggtcattatccgtggagttagctcactctccggtaccaaccaaccactatatgtcgtggatggagtacctttgaataactctaccgtatactctacagatggcttgaatagcggatatgattttggaaacggtgccaacgctatcaatccggatgatgtggcaaacatgactattttgaaaggtgctgcggccactgctttgtatggtagccgtgctgccaacggtgtagtcatgattactaccaaaagcggccggaaagaaaaaggagttggaatcgagtataacggtggagttcagtggtcaactgttctgcgtctgccggaatttcaaaatgaatttggtatgggatggaacggcaaccatacagaattggagaacggttcctggggacctcgtttcgatggttccatgcagttgtggggtaatgtgtacaacaactctcagaaactgaaaccttatgtggcaatgcctgataacatcaaagacttttttgatgcgggattcagatatagcaacagcctttcattcaatggagctacagataaaagtgattattatgtatcattctctcagatcagcgatgatggtatgatcccgacagatgccgacagctacgataaatatactttttctgcacgcggcagccataaggcaggagcgttgacattctcttcttcactgaattacgcttatcaaaagaataactttgctactacgggacaaggtttgtccatgctaaactctttatatcagacaccaagagatatcagcataataggactggaagaccagaatgatccgttcaacactccgggatattattataccccctacggagttatgaacccttattatattttgaataactatttgaatgaatatgaatctgaaagattctacggaaaatttcaattggattatgaattcctgaaatacttcaagtttacgtaccgtatgggcttggatactacaacaggacaaagtgacaaaggaaaaccgaatctgtacgctctttattatgaaggtactcctaatggagaaggtcagggctccagcagtcctttctctggtgaaaccggacaatattctgagcagataacccgtcgtcgcgagataaaccaggatattatggttaatttcaatatgccggttaacgattttaatatcaatgcactggtcggtttcaatggcaatgaacgtaaagtctcttatcaatattcagaagttaatgatttaacgattcctacatggtttaatctgaagaactccggcaaaactcctatagtagaacagcatatggaactcagacgtctgatgggtgttttcggacagtttgaaggttcatggaagaatatgctctatttaacggtaactgcccgtaatgactggtcttctactcttccgaaagaaaatcgcagtttcttctatcccggtattaccggtagttttattttcagcgaattattgaatgacaatctgcaagatgtgataacttttggtaagatacgcgccagctggggtaaaacaggtaacgatgctgatgtgtatatggttaatcctgtgtatgcacaatcttccaatagaatacctttcggttctctgactttccccctgggaggtgtcaacgcttattctgcaggaaatgtactcggaagtaatacattaagtccggaaatgaccacagaatctgaagtcggtttaaatatggctttcttcaaaaaccgcctctcttttgacgtatcttattataatagaaataccgataagcagattttctctttggctatggaccctgcttcaggctatacggcacagaatatgaacctgggtaagattcgtaaccgtggtatagaactcctgatcagcggtactccgataagaacaaaagatttcagttgggaactgacatggaacttcacaaagaactggagtaaggtgatcagtttgccggaagaattgggtggcattacaacgatttatgggctcaatggaggtaccagtatgtacgctataacaggtatgcctgttggtgttttcaaggctcaggtagccgaacgtgatccgcaaggacgtattgtagtaaattcatcaacaggtcttccggttgaagccagcgaattcggaatctgcggagatatgaataacaaatatcaaatgggtgtttctactaacttgaaatataaaggtataagcttaggcattgattttgatatccgtcagggcggagtgatgtattcacgtactaaagatataaactattttaccggtaacgcgatacagactgcctacaatgaccgtaatcctttgattgttcctaactcagtaaataaaatagtgaatggagaaaacgttacttatgtagaaaatacaactcctattacaagctctaacatttataaatactggggtgacggtggttctgatatgggaagctgcttcctggtagacaaatcatacgtcaagcttcgttctgttgtattaggttgggacctgcccaaaagatggttgacaaaaactcctttccaggcagtaaaagtgtctgcatatggcaataacttatttgtctggactccatccagcaatacatttattgatcccgaaatgacttcatttggtaatgaccttgaaggtaactatggagaatacacggctaatcccagctcacgtcgtttcggtttcaacttaatggttaaattttaaacaggaataaaaatgaaaaaaatattattatatgcatcattagcaacaacagcattgtttgcaggttgcgacctgaacatcaatgacgacccgaactacccgatgaatgatcaggtgacggcggatttgatattcccctctatcagtgcttccattgcttcggcggtaggtggggaaatttataattacgctggctttttcgcgcagtactatgaacagaaaccggagtcgaatcagtataacactctatgtgaatatacatttaccgaatcttcccagcaaatggattattcgtatagaatcctgtttgcaggagctttggaagatgcaaagcaggtgctggaaaagaccacaaaccctgccgaccgattcgctactaccatactaagagcatatgcctttcagataatggtggataacaccagtgactcaccttattcggaagctctccaaggtaatgctaatgccacacctaagtgggatacgggtgaaacagtatataaaggtatattaggtgagatagatgcggcagaagcagctttggatggaagtggtatggatgtgccggatttgatattcaacaaaaatatcgctcaatggaaaggttttgccaatgctcttcgcctccgtatgtatctgcgtttcattgatgccaacatagatgcggcttcgtatacagagaaagtgaagaccttagtacaaaacaacgaattctttaccggtgacgtgaaactggattgtttcttggatgaaacagacaaacggaatccatggtataatacgaatgcggtcggattgaccggtaatcattgtgctgcctatccgttagtatcttatttaagcagcacaggagaccctcgaatcgcttatggtattagtaaaacagatgcggatggaaagtatgtcggtcaacttcccggaggaaaaacacatatgcaaagcattctgggtactgacaactggaaaaacaaaaacgtaagtgcgattgattactctatcggagccacaaaacctgtctatttctttactcaggctgaattacaattcctgatagctgaggtatatgctcgttttcacaatgatgatgcgaatgcaaagagtgcttatgaagcaggtgtaactgcagactttgccgttcgtggatttgcaggtcaagagaataccattttggaaggagcgtgtgcatggtctgctgcttctacacaggcagacaagttaaacttgatttatatgcagaaatgggtatctcttttctatatggatcatatggaagcatggagtgagattcgtcgtacggattgtccgaaactgtcttcttattcagcagcacagatacaggctaatgagtcagtatacactccgggagagttagttgccccatggactaatggtctggaagcgggtggactgatgaaacgtatgacttatccattaagcgcacgtcagcaaaatgtgaatactcctgcaggggtaccgggaagtactccggtttggtgggatatcaaatagtaaccaataacttagtaagttttacgtatgaaaaatataatatacagcatattagtatgtttgccgtttgtctttggagcttgcgacaaatcaacagatgacacttctaaagtcacctattttgttacgttggaaagagagggtgatgaaaagatcgttttagaaaaagggcaaccctttgtggagccgggatattatgcggaaatgaacggagaagatattactgaatctgttcagataaaaggtagtgttgatgtcaacactccgggaatctacaatttagtatatgcggcatacaacgaggacggttttgccaaaacatttacacgaacagtatatgtggcagataatactgcttctcctttgaaatccggaatttataccgtagccgaaggaagcaaacgtaccgccccttctgtggtagctttcagtggatatgagattgtgattttccagatggaaccggggattttttatatcagcgatttcttaggaggctggtatgaccagcgtgctggctatggaccggactatgcaatggttggcaaattcgaattgaatgatgataataccattactcctctggaaagttatgttgcaggttggggagattccatggatcaaatgactaatacattattggaccctgcgactgggactctgaaatggactgttgcttatgccggtcagctatcttttgacattatagtaaaacaataaaaatacgattatgaagaaatatatgatattacttttagcttcactggcttttacattcgtggcatgcgacaacgatacagaaccaggtggtactgctgttgaaaaaatggcaggagactggtgggtgacagtgaatgcatttattgacgggaaagaagtagaagatcctttcggagcaggacatctgcaaatgagtacttacaatacagccagcaacagtgaaactgaaatgtggttggatgatttaggaaacttctgggaatataaactgaaagtaaacgtgaattatgcagcgaggactttctcgacaacaggctttgtggataatgtaacatatgaatccaaagtgaaaataactgatggcaaggtactggaaaaagctgccacaactcctagtggtatgcctgctgacagtatcgtatatatggtacaattcgacgacgatgaagatggattaacttataaagtttcaggcttccgtcgaacaggtttccctgctgacgatttttaacagaagagtttaaatatagagagggctgttccaatgatcggagcagcctttttgcaatctaacctcaactaagacagatcaatatataagcagtctccaatatttacaatatttccttgcctttaaaagaaaaatgaatgggacaatgtttttaattagcaacatccattacctgattaattgtatacaaataaaagcgcctcttatagcatgatactattttttgtttataatagctccttgttttatagatataatattgattataagataaatagttttcatttcggtagagaagtggtattacataaaagagagtaaaacattagctgaattagggtaattaactgtcaaatagatatataagctatttctgcttgataaaatatcgactggtgttactgatttatcccctatatacctaactgattatcagttatatataaatccatt

SEQ ID NO: 90 - DNA, 57285 bp, Bacteroides thetaiotaomicron
  source 1..57285: mol_type = genomic DNA
caagcaacttttacctcgtcgtttcctctattggaaatgcgcgtttcctgccttggaactggtacttaacttatatgattggagtgacttgaccacagcaaatgtttcaattaacctgttctttcaggaagcaataaatcatttataggtcaataaaagctgagttatcaactattaagacctgagttgttagctattaacacctgatttatcaattattaatgactgatatatcaattattaatagttgatatatttgatataatatattgtaaatcaaagcgttatatcaatggagatgcgtaatgcactgatacggagtgagagcaagaggttgctctcactctgccaccacacttactaccacaccggaaacatcgatgaataaagggatgcaagtgaattgttagagcatgagagtaaaactgctatcaatttactgtgagggtgctgcctaggtgtcatatagataaatataagaattctatatgtttggtgatatgtgactagtttttcaaattcaaaggatattacaaccttattttttatttggataaataataataattgcctgtggcaggaagagccagaaaccggagactggttcaataatgcaaccgattacagtaagtagtaaaatagagtaacctaaaaatacgggtgccggtttttgttcttttttgatataatattggagtgtttgccccaaaaggataagtattactccacaaatcaagaaccaaaaggcgaatccttgactataattctctccaatagaatttaccaatccatttctgagcatttccgaaaaagcatcttttccgataaatagtgcataaatcgtatgaatgattcctgtcgctgttaaaaatgtcccactatatttccaaagtttcatgtttttattatttatacttggttaatgctgcaaatataaaggatagtaagacatgagtattggatgaattcgacttttttattttgtataaatgatagtagtctcattatcgggtaacaatgataaaaagaaatttggagtactaccggataactttttcatttctcttgataaatgagaggcatcataatatccggcttttactgctactgataaaaggttgtcgaatgattcgttcctcaatattttaatcgcattcttgaattttactatactattatatttttgaggagtgaaacctgtatgtaacttgaattttcgttcaaaatgtcgctggcaaagattaacttcgttcattaaatggcttatggatatcttgccttcatgcgcattaatttgattcacagcatatgcgatttgtgtatccattgtatggctgcttttatataggtgctctttcaaatagcgttctattaaattaatcttgcactgaatactctgttcttcgaataacctttcagcaaaagaatcgctgaaaatagtatctaagtcattcacacttaaccttatatttgtcaattcgctgagagaaattttcataaaacgggatagtccgcatggacgaaagcgaactccaaatgtattgatagtacctgatgatgttattaatgctgaacagatatccataggaccaataaaataagaatgataaggctgcattttaataccatgattaacagtgttttctaatataaacataaagtccgtacatccatctgtagatagttttatttgcataccttgttctgtttggcctttgaattcccaatatctatcaacgtagggagcaagtatatggcatggtaagtattctttgtacatatttagaaagggtatctgttgaaaaacgatctgatagtacaaatataagcaattgtataggattcctattgtacgatttcgacatttgtatttgttttagattctttataataggaaattcaggtccttattgtactgctttcgggtagttgtgaaaatgggcattgattctttttctgtttttgcggagaagtaagctgtgaatattcaattaggttttaccatattcctttaacttttagttaagtctggtaaaataaagaaagagtttcgaattcatctatgtgtttgtttaatctttggcttttcggaaatttcttcataatatgtgatttgaagtaaatggtataaatatagggaggatataatttaaaccgtttttcctaagttgtaattttgtttaatgacaatgctattagaccagtgaactttgaaaattattatctttgttgtctcatgtaatgatatgggtttagtatagaatggtaaatgttataatatgtgattgacagatggatattgagaaattagctacatcagccgttactggatatatttctaagaccgattacttgtctccttttataaatgaaggggataaggaaccatcatgggatggtaatatttacgtctttaataatcgttctaagagcaaatgctatttaatggggaaggttgctgttcaagtaaaaggaacatatgtcggaaagcctgtactcaaaactcactataaatatcgtgtggaactttctgatttaaagaactatgagattcatggtgtagcttattttgtagtttacattgaccacgaaagagaacctcatattttttataatttgctacatcctgttgatattgaaagaattctaaatagaagtgttggtaaaaaaggtactaatcttgagtttaaagaagtaccttctattcatgatataacttcggtcttgataaattttattgatgattgtaacaggcagtcaagctttgtagcgagtcctaattttgagttattggagttagatgaaatacaattcaaacaactttctgttagtttttctgtaagttgtaatgaaaacaaagtgtcttcattgtttaagtatatgttttctaatgaagtgtttttgtatgagaagtctccattaacaggttatccggatagacctattgataaagttttgattcaggcttttagtactaatcacaatgataatgtatctattgatgatgaagtcttttttacgacttttacctcaaaatatactaaagcttttcaagaaatctcttttggtcaatgcattagtattataataaatcaagataatacatattcgtataatgtaaatttaaaaggttcgataaaagagcaaatacatactttggaatttctgctaaagttatcaaagtctttatcttttaatttaggaaagatcaaattgcatataaatgaaaattgttttgatgttttaggaatggaggaacaatacaactatttgcagagtattttgcaagttctaaactctttaaatgtgcaggaggatttaataattgattatgataactttgatgactgttatgaaagtgcgctggctgtcttgataaaggtgatagtaaataaacttccatatatcaattcaaaatgggcgaatattcagcgtgtaaatatgcggattttcaatctttatctgccgttggtatttataaaaggtctcaatggagagcctgatcgctttgttcatgagctgacacaagatgtagaattaacaatgcaatataagagtaagaatattaggatgcctcagtgcatcttatttagtatacgtgactatgaatatatttcttcaatatattatgatactatttttaatgagttaacaagttatggaagtcatgagatattagatgggagaataaaccaagcacttttaaatatgctttctgcctttgataagacttgtaatatgaagttgttagataaagctatagaattgtctgaatggatatattcaaactgtatatcattaccaatggaaattaaattgataaacaagctacaagcaatcaaaagaaaacgatccttaaatatggaagagctagcagaacttgaagttttgagcatacaaaaaaatgatgcagaggttaacactgcaatatatttgctcttagagaatgttgaaaaggtaaatatatattacaagtaaatagaaaaaaagaaagcttttaagagttttcctatatttaaattcatgaataaactagctatttattaaggatgtctatgcatctgaattaagtgaccaaaggtcagtggttttctctatttcgtaatattggtataccccttccttcataccattaatacgaggaaactccctgtcaacatccaattcatctacggcacctgtactgattttaccatcaacagacattaacataaagagggtggtaattggttttatttttctaatattgttcattttataatagattcaggaatttgtcatcttttgcgaatccgttgttaatccagtaggtggacgattccggcataatcggcgggaatatcatcgatgctgtaattgggcaataccgtgaatccaccgcatgacacaacgggagcttttgtcaccgacactgttttaaccacgtacttactcttgatatcaggcccacaaccgtaattcagctagggagcaatgtacactccttcccaatcggcaaagtctttgagtagtataaatagaatctcttgtttcattattcattgtattttagataatttattttaatcatttataccatgtttatacgggcagacatttcggcattgccagcaacgaagttccaatacaccttttacggtaatatagcaaactttccggcatcctttttgactaaaattgttttcgtcagtgagtgctcccgaaggacaaagatcgacgcataggttgcagttgttgcaaacctggtatgtcgccaatggatcgggctctaattccaacgaggttactactgccgtaaaccaaagcagattcccgtacttattattggtaagcaggtagttgcgagctataactccaagcccggcaagttcggcagcatgtttaagtgacacacgcgagcggaaatgtccatctacgaatttaccgctaagagagactattgacacggctttgtatttgagtcctttgagttcggctgctacatccgcagcaaccttatccatctttttaactgcctcattgcgtatatccgtatatgttcgtatatcctgttcgagaatatctttgggtaaaaccattccaagagagatgactgacttagccgttggcataacatcggttgggtgatatcctttcggagcatttacaaaccgttcgaccgaggcaactcccaccagatcagctccaaacgagcgacataactttttaatctctttatttgtcattttttttgcagttgtattatattaaataatccccagtgctattgcgataaaactaggaccattgattaccccatgtagaaatactcctgtccatgtgttctgtgtcttttgtaccacataaggctctatatacaatagcggtaataacatgacaagtagttgccaaccaaacgctatatgaaaaattgcccaaccagtgccatgtaatatccacgttttgtcttcgaaagtcttttcttgccgaggtaacaacacacctctccaaaagaactcttcgcctccgatattgagcaaccaatatggcaatcatgcaagcaatagccaatatcttctcggtgaaagcggatccaaagtcataaacgatggagtatggttgaaatccgaaaaaaggacttgcatcgcaatcataattccacttgtcaagagtccgattaccaccaacgccagaagtgaataacgccaatctctacgagtcataggtctgaatcgtagtcgctccacaaaggtctcttttgtgaatttgcccccttctttgcgaagcatcatcacgccggcaataataagtggagtgaaaactccaagccctccgcaaataaaccagaagataatggactccaatccggcaacttccgaaagaaacggaatgcataagtgggttatcacccccataagcatggctgccgatacgaatatcagtgtcgatggcattaatctcaatggtttcatttgtattctattgcttattatttacaaaatttcttattttcaatcgacagaatgttcggcaaagaataatcctttccgattcaaatccaatttcttcatttggagaataatacaagtctcttcgaaaggaacgataatcaagaatggtaatataaaccataggaaagagaagctacccataaaaatataaataaaaggaatacagtatattaataagcctactattttattcccgatagtatgaattgcaccaagttgatagaacttgcggtacataatcccgatattagctccacgaagtaaggctacaggcatcaagaatggtataaagtcggctaatgcattaaaatcccataaacaaagcataatgattactaccgtatacataataagatctgcaagagagtctagttttgctcccctagtactttgcaggttcattctacgtgctacataaccatcaagtatatcactaagtccacataaggaatagagtatcataaatccatagtagttacttacaaatagtaatagactcaatgacagtggaattctaattagacttagtatattaggaatatatctcatgcaaatgtaatttttatcaaagctggttctcatatagtcaacctctgtatctacttcgttatttgtcccatactctacaactctatttcataaatacgtgattgctcttcccatggatgataaccatctccaatatatcgaaaaccatacttctcgtaatatccaacatgagtggtgctcagatataaactcctgaatccaaatttccgagcatcctctttggctttttctataagcatttgcgcatagttattacccctatgattttcgtcaataaataaggcgcagagccacggatataaatccattcggctgataaagtcattggtaataagtcccgcacatccgataaattcgccctctttttccaggacgtaccactgaggcagtggatgtagagcatctacacaatggcttatacaatcgctatatagaattggcgccattttgttccaacattgctgtaaatacgctataatttgttgggtgtattgaggttgttctcttactgatattatattcataatgttgtctattatatgttcctttttctatttgcagcaattataactaatgcttgcggcaaaaacagccaaaaaccggaaatcggctctatgatacatccaaccacagcgaaggctaaaatgcaataccccaaaaccagaggtgcaggtttctgctcttttttgatatagtattggagtgttagcccccaaagaataagtataatcccacatactaaaaaccaaagggcgaaagcacggctgtaactgtcatctgtggagtttattaatccatcttttatcatgtccgtaaagtcctctttcccaagtaatagtgcatatactgtatggattactcctgttataacaagaaatgtcccactgtatttccaaagtttcatatttttattcattgtcatagataatattttattaatgtgcttttatagtctttattactttctctttttcttatagttctgatggagttgtgtttgccaaatttttagcttcttttacaaaatgggaaaagtcggtatatcccaattcgtcgtataaatcataactaccatttgcacgatagttcttcaatgcagttttaaagcgtaaagctttaaagcattgtttgggtgatatacctaatacttctttgaaatatctattgagtgtaggatttgacaccccaacttccttacttactgtgttcaatttgtaattacggttattattgatatagtaaattgcttttattacagtattgagtttgaaatcagaactaaagattttcatattacttaaaagccaattctctacaaactgaactcgctcggcaaaagagcttctcaattttagttcgtctattactttttgatttagatacttttgcagcgacaaatgattgtccaccaaagttgaaatatctttagacaaacaggagtacaaaactcccggcttgaattttattgaaaattcatgggttccgggagcgtgtattacagtgatcgcttctgttaagctaccagatatcttatcccccgatgtatcaattataccatgttcacgatgtactttgaatgtctgactactatcggaaatataaattgaaactaagatattagcattgggcaaagccacaagtgaaaatggagttatagaattgttaggagtacatatttcaaaataatactcaacaatatcctttaattcaaaacaaggatatttaatctctacctgttcttcatcttcaaatatgactttactctttaccatgtttatttagttaggtgatataatacctgaataccaagcccgaatgtcatcattcgctcttttttgttggttaatagctgttgtgtccaatcaagcaatccaccgtcagcaatttcaatagtattgccgccgatcactatttgctgctttattctgaaaccatggtaatagttattatcatgttccggtgctataaccaagacctcaagattactattcttttcccggacatacgatattgattccattataagcgggctttgactgtcataacctttgcatggaataatctcataatatattttttccacaccgtaacttttacatatttcatacgatgtagttaaatgttttaatagttcttctttctcaaaattaaagctaccagtatctctaccacacgaaataagggcgagaacagtaaaatgaggagtgaaattaggattattaaatacctgtgtccttattactcgtgaaatgttactgtaattgtaagttttgttatctaattctccttttttctttaacgatgcgtaatgtaatgctattgcattcgtcgggtctgcctgtactcctgtgtttcttaaagaagtaaggacttttttctgatctactgttgctataatactacttgtcccaaactgagcgaccggggaaagttctatggggtcaaatcctctacctgctattaatttatagcaccgtaattcattttctttatattttaaaacatcttctaataaggcgggcttaacaagcttgttgccctcatatttacttagtaaagacgagggagtttcctgctgaacacgcttgttaaaaacgtccagtaaaacagtgttcagttccgacccgcttaattcatcggacaacactttagctatatcctgcaaatctaacttactaataatgtgatcgcctatatcttttttcatttttttctaatactatataaatattcatcaactatttgtccctcttttataactgaggacttaataatgtcttccttttcaaaacctgtttttattatgtaatcgtatcattttaatatgcttattgttttttgcaaaggtaatctcatatgtcatattaataagtgtaaaaatgaatcaatctgctaattcttttttaatagcctaatcattaatcaaattgttctaatagttaatcctgaattttatcttttagttctttttttaattctgatggaatatcattccagtgtaagtttaatagagctccttctaaagaatagagataatagcacacaggtatagtcttttcaggatgttgttcacgtatctttataaaagctttgacagaggttgtttctgcaagatcggctaaagtgaatataccaatttcattaaggtatttctcgatagttgcacctatgttcttcgcatttcttaaattgttgtctatttttgatttcatttttactatggattacgtaatatatattttctttctacaaattcggtaatattttatcatttcggcaatacttattctacaatgattcaatagatcgctttaaacatctgatcggtacccaaccttccttggttgaattttcttttcgacaccataaccaaccatttaggcatcttgagccgattactatctcgtcttgatttactagtaaccctaagttcaagttataaatgcgacagttgattgagaatatcgtgtagaaatataattttagagagaagaagatgaaaaaaactcatctttcttctcccttggaaaaaaagtttctatcttactccctcaatctcctaccaaatcagtcgtatgatgaaacagtttaccgaattacaaagatacgaattgcaagcgtatctgcaagcaggaataaaaaaagatgaaatagctcataaactgggcgtccatcgcagtagtttatatcgtgaacttcgtcgtaataaatggaacccctcagacgtatacgatgcagcctatgcccagtatcgttatgagcttcgtaaagagcaacgcgtccattcgaaaaagtttacgacatatatggaagctagagctgagaccatgcttgttcaacttgattatagccctgtgtgtcccattgtccatagaagttcctgctgctgttaatatcgctatatgcttaaagtgagaaaatagattggtcaatagacttctcatatattgttttgtaccattcttagctaattcctcagttgtccttatctcttcgataggtcttttttgctcaatgccattaatgtaccaatagtcttcattaaaactaatgctttgatttcttgatatatacaagtatttcatatcggataacctttattattctacaaatttgttaagttcttcttcaacttcctcaattgttggcaatttacttttcagattatcaggaagtaactcctttacattaaactcgctaaccccaattggagaggatatattttgcaatgcatattctacttcaatcctatctttatctcgacagagtagcatccctatggtcggattatcatattctcctcttagcgtgttgttgataaggttttgatagaagtttagctgtcccaagtgttcaggtttaaagtttccatttttaagctctataactacgtaagctctcaaaggtatatgatagaacaagaggtcgcagaaatactccttgttgttcaagttcaaacaatattgctcccctacaaatgcaaaccctttacctaattcaagaagaaactgagtaatgtgagttacaagttgtttttctatatctcgttctcgtgctttttgagatacagacacaaaatcaaaccaatacgggtcttttactacttcctgtgccatatccgctgttagggctggtaaggtctgcgagaagtttgtttgtccttgtccgtaatgttcgtagaattgttgcttgaactgattttctaaaatgcttctgctccaactattagatagagtttgatgtgcatagaataatgcttcttctatattttgagctttactaattatcaccttttgatgtccccaaggaatatcaaagataatcttataattatcagctatttgtaattgtccctcaacttgggggacaattgagctattgggcgaaatatgcatttgccctgcataaaactcatagaaattcttactgtaatataggttctgacgggaaaagccctgcatgtcaggaaactcattgcgcaagtctactgaaagcttatttattaccttgtcaccccaattctgttctttcagtttttgagagatcatttgtcccaaccgccaataaaagtgtatcaactctgtattggcagtttttatcattcgtattttggtagaacgaatttgctgtttgatggcttttagccactctatatattcgctatctattgcgtttataggataatccttcatgtaactatgttttttgcaaaggtaaataaatttatgatagtatgtttttgaaatacattcttttagcacggtttagatgaaagtcatgaaacggtcttgaagtatttctctgaattaaaaagtattgcatttgtgcttgataccggaaatctgtatctattaatattgtataatttgtatctgtttctgtgaatgtgtatcagagaaaaaaaggaaaaaatatatgttatgattgagtgtttgcatcagatacacccattcccattcgttatactccatcttttgaaaccaactaaaaaatcatttccttttgcttgaaaaaacattgaaatttatatctttactgcaaaaaagaaaaatatatgaatagtttatttgattcatttgaaagaacatgtctcgaatttgcaaaacacaatgataatacttacgagtattataataacagcgcacgaactgatatgtcaaaagtgagagatactttagagagatggttctataattatcctgaagaagaaaaaaaagagctaaagagtcgatttaaaaaagattttgattcttcattttatgaattattcttatatgaactattttgtaaattaggatataatattaccattcatcccgatttagcttcttctcccaagaaaccagattttctaatatctaaaaataatttagagttctatgttgaagcaaaggttgttaagagcaaaactatggaacaggaggcttttgagcgaaaaagaaatgagctatatgataatctaaataagttaaacacaaaagatttccttttaaatattgaacacctttgttttctcactcagaaacaaccaagtacaaaaaggatgataaaatatatagaggaagaattaaagagaatagaccctgacatattaagtgaagaattagagaaaaatggcattgaaaatttcccgaagatagaatataagaatagggatgttcatattatagtaagccctatccctgtaagtctttcggcaagagaggaaaaggcgcttccgataggtatatatccagcagaagcgttttggggaggaggcgaagaatctctcaagaattctattgagaaaaaggctaaaaggtacggaaagttggataaaccatttattatatgcttaaattcgttagacattagaacatcgggaaaaatagacgttgataatgctatttgggggacattagcattatcatggtcgacaaatccggaaagcaaagacgaaaaatggatacgacaattagatggagtgttttgtgatgagaaaggtgctcgacttaaaaatcttactggcgttttggtatccaaattatatccacataatgttcctgttgctaattattggctctatgaacatcccctttccgagaataaaatggatttcaataaaataggattgaaattcaactatataaataaagggaaaataattgataatacaggcgatgatataggtaatatacttgagatttctaaagattggctaatctaaatgattatcgggaaagcattttactttcccgataattatttagaaattgttctcattgatttccctttcagggaaccttctgtttcgtctaccctgtttgtagattttactatcattttcagataatgcatattttccttgaatcgtttccgcaaggttggtcatatcctcattgattttggtacgggtaacttccgcataaatttgagtagtctttatcgagaggtgtcccatcatttggctaaggctctcaataggaacaccttgtgtcaagcagaccgttgtagcgaaagtaaatcttgacatgtgaaatgtcagccgtttatctatatcggcagctttggcaatacgttttaattgccaattcatattcacatgggtttgaaatttaaaaacttttccacctgttccggcaaactccgtatttctgtatcgttcaagaatgcgtttaggaatatccagcagtgggatatacgaagttgttccggtcttttgcctgtcgagaataatccattggctaccgtcttccatttcctgaatattggaatgtttaagatttcgtaaatcaatgattgcaattcctgtgaaggtcgaaaaaataaacatatcacgggtaaaacgccatgtggcaagtttgagcttggcttgcatcattcgttgtatctcatcattagatagccacggacgtttaggaattacccgttcagggacaaaatcaaagaacgggttctgacgtaaaactcctttattgcaagcccttacaataacttgccgaaaagggttcatattggttttaaccgttcggggtgtcatttttaaatcaattttcagataatggaaatagctctccgcgaatggcgtatcaatcttgccaaaaggtaaatcggaaagattgtactttttttgaagaaactctttcatgtgacggtaggcattggtatataccggaaatgtactttcggttatccgtattccgatacttttccgtttttcatccagcagttcggcaaattcctgcatcaaggtattgcgatttacaccgataccacgcaacgcatttttaagggcttcagcagtaacgtagccattgttattgcaccatattgttataatgggaagatatttcgttgcggagcttctctatctgcttattgatagtaacggattctttagattgcccctttgccgtacctgtctgattatcccaatcatcgggcattatttccagtccggtgctgaatgtggtgttcttgccgtccacggttatccgtccgactatcgggcaagctcctgattttttaattttactggtgttcgggtaaaataatatactgaatgtgcttctattcgttttcattattattggtatttattgttcgacataggtgtatttatcagagatacggagcgatagtaatttcatatcattgcctatcttctcattattgacacgtgcgtagcgttgggtagtctgaatattcttgtgccccatcatccggctgacactttcaatgggtacgccttgcgaaaggcataattcggaagcgaaaacatgccgcccgacatgaaagctaagtttggtcgtgatattgcagagtttagctatgattttcagcgcataattaatacgtcccggtcctaacatgggaaatacattttctccttttgccagccccttgtatttctctataatctgtactggtatatccaacaatttgacattaaacggtgttccggttttttgtctgtcggtggaaatccacaggctaccgtcttcttcggtaataatctctttccacgtaagttgtttcaggtcaatgtaaggaagccccgtaaaggctgcgaatacgaacatgtcacggataaagcattggcttttggattctatcggagtggatataagcctttgaaactcttcttttgtgagtgagcgtattttgaaatcgggcttcttcaacttgtagccaaagaaaggaggattgataatcaatttacgatgcaaggcgatacgcacgactttgaaaagcaccaacatagtaccggaaactgtttcatccgtcatttttctttccactcttaaatgaaaatcgaacgcttcgataaaggtcaggtctaactggttcaggggtacatcctgaatgttatacttgactttcagaaagcgtttgacttgttttctgatggtaacatatttgtggtaggtggcttgggaacggtctattccgatacgtgtttggaaatcctgcatcatttcatcaaagagagtaagcagtgttttttgtgcggtcgcaatcccttgaaatgcgttcttaacttcttgggcggtcactgttccagtacgctctaaaatacgcctgtaatgcgtgtgtatggagagattaattttattaatctctctgttgagttcaacggctacacgactttttccggtagccctaccggattttacactccaaagccgttcttcgattttcagtttggaactgaattgggcgatggagttgccaataatgattttcccgacaatcggataaatggcatcggggtttacttctgttttttctgtacttcctccccgtttgaggtaaaaggacactttaagttcgttgttcataacgctcacattttaagttcgtaaaattactttcttcgtgagttatttgaacaatgtaacaagcagacaaacagtgctataaccagacgtttaaggtcattggtttgctgtgtttttctccaatctcaatgggtaacgatttagaaacggaaagtttgctcaaatatactttttcctgcaatttcatcatcggacacccaaagacactaaaagacgtacatttctatcattcaatcaattaccttgcttttctctttcttgcttctactgtaataagtcggtataacagctaaaaatgaaaatatcccgtacttgctccaatcgctttgaagcaaattccttattgcatatccggtttatttcgtccttgtcaagatagcctctttctatatactcgaatttcagcttgtaatgggcgaacgggtctgcggttatcaatcctgtgccttgcgcaaagttcactactgtacggaaacgctgtatgaacttcattgccgtattgggtgaacagtcgtggttctttattatatacaggtagaagttctcaataaaaactttgttgattttgcgtataggcaaatccgatacacgatattcgtctttcaggaattgggtcaggcgtaactttgtcagttcgtatctgctatacgttttttgggtggcttctcctgcttcgacctttttcttgtactggtcgttgtgttgctcgaaaaaggaaatgatagtcagtgcttcttcctcttttcccaaaagtgcatttttcacgctttcgggggtaacatagctgtcacgcattaactggttgtggaagtgtgaacggatattggctttgatgtcgtccagcatggagttcagcctttgtatttccatagttttacctacggctctgccggattgccagttagtttctaagacctctaacttggtattgaattgggtttgtttgccgtcgattgtgatacgggcatgaatgggtactaaaccattctttttcatcttgtcttttttcaggtaaaacaatacgcagaaagtacttttttcattcttcataatctcactttttttagattgcaaaactaattttaatccttgataatgagataaatggaatatagacaaatcccgtcaaaagtaagccattttccgacaatcgtaccccctaatcgttttttggggtagggggtacgatttggatactgaggctgtgtcttttcgtgccctttttttgtctttcaagcaagactaaaacataaaaaaaagtcccgcaatatcttgatattgtgggacttgtctgttttttgtcgccttttggctttgttcctatgtgatccgcctgggattctccttacagagttaccacgctgatatttaaaactttatatttttagcttcaagcatatcccatgatttaacccactaatttgctacgtgcttttgcgatagtttgctcatggagaatactgaaagcaaagataagtactttctttaaatctacaaaattaggggtaatatgcatttgtttccaccagaaagtgaacgctttacgtatcaccattgacaatcaccgacttatcttttctttcatcggaaaatccacacgatttagcacacgattatttctcatcgttttgcccgtgatttaacacgattgttactgcaaagttaagaaagaatattaaattaatccattgtttgaccgaaaagttgaaataattagtctttttacttctcttgtgcagcaaaaatagggcataacagaaatagaaggtaatttttatggcggtaaaatttacggctgtttaatttgcctttccattgttccgaaacggtcatttccgaaatgtgcatttcgcatcgaattattctgtaagcgaattaacgaaatccccaaacctcaaaatcttctcactattcgctttattgaaaagcaagtgctcaaaatccttttgcttcttcttcaaatcgactgttttcagcaattcgcctgctgcctgtttgaactcctgcaaattatgtactccgcaacgctttgaaagaaaatcgtaatcgggttttgactgcgaaagcaaaaacatcaggtcgtaaaaatcacgtcctttggcgcgggctaacatggcggcaattttcatactgcacaatacaccatcagaaggaacgggaaacgggaaaaagaatccgtaccctttgatatttgtgataacagggggataagcaattccttggtattggctttcgacctttatcaaaaagcgttcttccttatgtccgctcaatcccaaatcgaataacagttcaggaaaatgaatattacgccggaaggctgttagctttggattttttttatcttttgcctccacgcgtaatcctgaacgttccagaaactgaattacgccgtttgtcatttcaataaactcgtctttcgacaggtttttgcagtcaaaatccaaatcttcagaaaaccggtctatcccttttactaaacgcaggtttgtcccaccgataaaagccatcttttggatgtttggcgtagaagaaaggtaatccagaatcatcaactgtaaatactcttttagtatgtgcttatcgaaccccgaatttccacggatttgaaccggaaaataatttcttatctgttcaatctgtatcataaatcgtaagttttaagaagtaactttacacgatgatcaagtgccttgctttgaaacatgtcgcagtagtccatcagtaaatccttgtttaaatcatcgtgcaggtaatcttcatccaagcgcaattcttccaattcctgctcactatcatagaacggataaagatacagcaaatcaagtaatgccttctcgggtgtggcaaactgtatggtacgattgtctgccattggcttcaactcgtacccgaacatcaggttttctttgacgttcttataagagtattcgccgaagtcattgacgaaagatgctgtttttagggttgtcacactggtaatctgtaccaccgcttccggtatcatcccatagaacgacaatgctgtatgcaagctgatataggacggacggtaaatcctgttggcaaaataaaggaaataatccggtttgctcttatattcagagaaagcaaagtatccctgccgtaaccggataagatatcctttcttcacccagcgagtaaggctattacggtcaaaatccgattgccatgcatatacctgatagatattgaagcatgccaaatcgaatagctgattcttaaattccaaaaatgtcatttcttgattttgtttctattatgctgcaaatataatgcattttagaaacaaaacaaaatatcaggattagttaggggtattcttgttctgtcgataagacgaaaataagctgtttttgttttgtcgataaaacaaaaaagactttgccctgctattttgcaactgctgaagtagtggtaacagagatgtcataagcaactttattcgaataaaaacagcttgtttattgtgaatggtgaagcaaaacaactaattcctagtattaataccatagatttcattcttaaaatgaaaaagttagtgacaatgttaaaagatttgctaactttgccattaacgaaagtttgaagtagaaatcttaaagaaaatatcatgataaagattaagttagcagatagcattattaaaagtcaccttgtggacagcaagggcaattcttattgttcaattcctattagtgtagataagaagttaaatgttgaagggttatttgacaagcttgttgccatagacccaaaacttaaaagttatgaccaatctaccagtccttactatactatatttgtgaatgtccccatagatatggaattagaagcaaaggaagctaattcccaagttggagaaaatacatatgaaatcatgtggggcttacctcaggatattattttgagtaaattgccttgttttgttcccaaacatcattggaaaaaagttgaagtatgaaagttgaagaacttcaaacctatcaagaggttgttcaatccctacgcaaaaaaggaagggctaagcatttgctgttgggaaatggattcagtatggcttatgatgccaaaatattctcatataatgcgcttagtgcatttatagaaaactcggaagatgaattattgaaacagctattcaacagcataaatacaaagaactttgagataatcatgcagcaattagaccttttcgctaatgttgctcaagttttcaatgcagacaaagaactgattgataaaatcaagcatacaagtgaaaccctgaaaaatagcttgattgatgctgttaaagcaatgcaccctgaacatgtgtttaagatacctgaagaaaaaaatgccgcttgctgtacttttttagaagattacttagttaatgacggatatgttttttcgtcgaattatgacttgcttctttattgggtattaatgcgcaacacttgtaaaaatgcaggagatggctttggaagagaagtcgaaaacccattaggagatgagtatgttccggattatgaaccggaatattctgaacttcgttggggtaaaaataaggatagccaatccgtattttatttgcatggtgcgcttcctctatttgatacaggaatagatataatcaaagaagaatataacggtgactacttattagataacattaaagcaagaatggaaaagaaagaatatcccatttttgtgacagcaggcaatgcaaatgaaaaacttacgcacattatgcataacaaatacctgtcgttttgctttgataagttttcttcgataaaaggctcattaataacatttggtttcaactttggcgacaatgatacacatatcatagaagccataaacatcgcggctaatcaagggaagaaggcacaagacaaattatggagtgtgtatatcggtgtatactcagatgccgatttgatgcatattgagaaaataaaaactaaatttaaatgtaaggttaatctttataatgctaaaacaaccaatgtttggcaataaggttaacttttttgtattgttaaagttatgtccttattcaatctatacaatgaaatagaaaaagaatatgaaaatcttattcctcttaagcaggaaggattggtgctgtttcatctgtatcagaaacaaaaggacggagacatcgggaaagagttttcagaagaagaaatcatcaaatcgttgagggagatccgatatgatttgaaaaccaatcagaaaatacagtttaataatatagtcaagtattttcaaaagtattttttatggcgcgatgaaaagaatcggctataccgtctcaaaccttttaccaaaaagtggtgcaaactgattgaaaatattcttgaagagacattcaatcccactcagctacaaaaagagtttttatacctttctaacacctttagcgaacaatccttcacagagtggtactctactacattcgaaagctatagccaaagagtagatacacaaattaataccctatatatccaaattgaccgattagtcattgatttcagacgacagatatcaaatgagcatgcttacgatttgaatgctttaaaatcaatagttaacacattggaagatattcgttccaaaacagaagagttgaataatgcctttagtggagcgcacgatattcaaaacaagctattgaagagtaatatcattacagaagatattcttctgaacagacaacgggcaaatgtgctatccttctttcaggaagttcgaggtaatctgaaaatcatcagcaagcgtatagacagcgttaaacctcgactaaatgaatatatcagaaatatcaataggcacgatttctacattcggttcaaacgcttctttaatcaactacttgaaaaaagcactttggaaaaaggcaaaatccgtttccctgatggcataccaagtatcccgatacgttatactcagcaaccaaggtttattatcgttaaagaaaattttgatggagcttcccttagtcggttcaaaacagcgaaatcaaaaattcccgtaaccaacgccactgaaacagagaatcgctttttattggaaaaagaaaggattgaaattcaaaaaaggattaacctttatatgcttgatttggaaaatcgactaaaagcatatcaagaagttgatttttctgctttcttttatgaagtgctcaaaaaagaaaatgggaatatccgtatttgtgtgaagttagctcacaaaaccatgtctaaatattaccgtgacattaattcattcgggatatctatttcaactgaaatagttggcatccccgaatatccaatgataaaaatatggaagacgattatttacaagaaaatgtaggctatgcatttttaacgacacaagaagcaatatcaatatttgcagatgtcgattatgctttgaaaagtggaaaacatattcaaaaatgtccttcacagggtaagcagtttgcttttgtcggaaaatattacgacaaactaaaatcttattatgacaatttgtttgatatccatttgaatcgtgagggcgaaggtgatttagaatactttttcattgatttcttcaaagatggaaacggatactaccaacggggtaatattcctgtagaaaatcgtgaatatcttgcggaatcgcatctaatcatagcctttctattaattcgcatgtatgttcttgaaccaagagcagaaagccgtatactaatccaagattttaaagtacaagtattgtcggagtatgaagaatataaaccgcacttattacggctatttgcaaaatcggaagatacagaagaaacggattatgagctaaaatctattgaagatgagatggacaaagcgcttaaaaaattcaacgatttatgttggattatgatagacaaaagcacggaaacttttgaaatcatgccgtctctcaatcgtttactgaatatgtttgaaaactacatcatcaatacaccgattagcaatgagtaataaaaaatttcctcgtatatatagcctttcaacagtaggcattcgtaatcattataattcagattatcgttttcatccgtttcggacagattttgcaggtgacagcggtgtcggaaaatctattattgcagatgtgttacaactgatattagtcggagaaagggaatttaaatctgccacagattcaagttcagagcgggaagcaagaaagttaatcattgaacgatatggatatgtatttctaaacattgcaatagatacggacaaatttattgtcatcgggatgtacatatcaactacttccattgacccttttattattcaagcaaatataggattagacgtatttgagcctctttcttcacctcttatatcaaaagattttatgttgggtgacgagattatagatataactaatcttcctgaaaggatgaaagaaaataaacaggcttatgctgcaaaactgtctttgaataaatatcatgaattacttgaacaaaacaaaatccttcccattgacctgaagacagaaggaaacttaaagaattttgcacaaatcattcgcgcattttctcgtggtaaaggatttaaaaacaattcgaaatggttgaaagagtttttccttaatgacgatagggaaaatatcatcaaagttcgttttgacgaacaacttgcagatatagcacaagaattaagagaccacaaagaaaataaagacacattagaaaaagtgcgaatcaaatacgaaaagttcaaacgtcttttcgatttaaaacaagcacgggatgcagcacaggaagactatttgaaaacaaaaaccatatttcattatcaaaacaagaatacggcagaagaaaaatgtattcagcttcagtatgacataaaaagtatcaatcataaagtagccaattcctttttgcgtttattttcagcagaagctgaggagcaacggaaaaacgtaaatcttttagcagataaattatccatcattgaaaatgctcaagaaaatataacagcgtatctgactaaagagtccgttgcatttcagaaataccccaaactcgacgaacagtacattcaagtgcaaaaagtagaaaaattacttgatgcttataaaacatgcgaaaaattacgagataggcactcaaaacaattgagtgagaaggctgaaaaggaacacttgaaaaatttgggtgatgaattgatgaagcaaaagttatatgaagaatggacaaaatctccttgggcgagaggagcagttgatggctctgctttttacaagaagagaacagaagaaatcaacaccgaaataaagagacttactactttaaaggacttttcagatgtcaccaatactaaatctttagcatattggacaatacagaacaaaccatcattatcacatgaggaagaaagtgtcttgttcaacttagatatgatacttattgagaaacctgcaagtattgaaaagaatacacaatatataccaaatccggaaactttttttggcaacttggaaatcggggaaaaagaaagcaatccgaatggtttttgggttgattggggcagcattaggagatttgtaccttacatacccgaacgatttttcacaacgaagaatagtgacgaaattacgggatacttcaacgaaaaatacaaagatgcagcagaaatcatcaattcattaagagaagagaaagaaactatagaggctatgcaaaaagtggcgtctaaacatggcgagaatgcagttaacgcttttgttcgtagagatgaaatatcagcatatatcattgatgaaaatttagatattactgccacacaattagatgaattgttgaaagtccattttaatggagaagacattaagcaaaccaaatcggaacttgatgctgccaaaatcctgaaaataaagggagaaacggagcaagagcaagtaaaaaaagatatacaacaagcctgccaaatagaattctcaaagaatttctcttttcttgaagttcaaaccgctatcagacaacttcaagaaaaagcaaacagactgcttatatataaacaaaatagagcaactcgatttcgacaattattttcaacttatatacaaatccctgaggatttagatacgacaagcatattaaatcttcgctcagaactaaatgataatctaaagaaaaaacacagttgcaaagaagaaataaaagttctgaaaactaagattcaagaagaagacagcctttatcatcaggcaaagttagattatcaagcacagtcagaccaacagataaacttaaaaattaatattgtagccaaacccgaagaaaaagaacaattattctattcagcaaggaatgcttataagcaagcatatgatgatattgttatcgagtttttaagcgaaaaaatgtatcaacgattcatggggtctgaagattatttggcattaacaagggaagttgttaatgagattcccgcaaaacaattgacgtcaaatgagacagatgctttacagcaaatgttagactttctcaaacagttaaatgacacacatatccatatcggaaatcggaaactgaatttgctcaaggaaatttttcaggatgttagagatgctgtcagcgattatgttgcaaaaatgtatgagattggagcctattttaaaggctcggataaagaaatatcacaaggatttaagttaagtcttacttgtccgttttctttaatttatccaatcgattggattgatatgtttttggaaaagcttaatgattcgataaaacaagaaagcattcatcaagatttatttgcagcattaagagaaaaaattgatattcctgacatgatggctacagcttttgaaaaatgtggtggattcaagaatgcgaaaatagaagacttattaaatcccaagaactattttgatataaaattcgaaatggagtcggatgatggagaaaagaatgtcgggagcgcaggtcagacctatgccgttactgccatgttatgcgttgcccgtctttccttagttgagaaaaaagaaaaggggagacaacacagtggattacgttttatgcctattgacgaggctgaaggaattggtagtaatttcgatttacttgaacgaattgccgaagccaaagattatcagctaatatcaatgtcaatcaatccccttgatgatttcagggacggtgaacaatatttatacatcctcaacggcagtaaaaagcggaaagaacgagtgagtacttttgctatatttagtaatgccgatgaaattcagaagatatgataaataaacaattaacatggcctgagtttaaagcgctgtatcaattataccacgaacgcaaaaccaatttgaaagtacaggaacgcccatacttcaaatatctaaaacgagaagggtatattaagaagaaaatcggttcaactaaaaccatagagccatacagtaaatttgacgatgaatatgagcgggaaaatatagaaggtctatttcacaagtattattcctttttgtcggaaaatcagattttgacgccccacactccattttcggaatttgaaatcaagagcctaatgaacatcaagcaatgtgagaatgtcttggtcgatagtgggcaaacactattatccgaaatgcgaagtaaaatagaggcaggaaaagacggacgaaaaggaatttcaaaatcgttcttcaaatcggccaaacatattgaaaagggttctgcattggaagatgctgtgttaaaaataatagggatagataagtttccccagaacgaaggtcagtggatttatcgtgttccatgcaaaaatccaacatgtataatcctatgtgaaaatcgttattttcttacccttgacattgccccaaaaaggaatgttgaattatggcacgttggcggcaataataccttgccgattgaaaatttaccgaaaattgaatatccgatatattacctgtgtgattgggacttgatgggattacaaatttatgagcggatttatcatcgggttgaaatgattaaggacaaagcctcttcgttacaacttctaaatcccaacggtaaacccgaacgaatcaaagatacagaagattatcaccgtagcgaatgggataaaactacagaattatcatcattaaccgctaacctatattcttctgaacaactggcaatactacaaaacctcataaaaactgatgagtggattgaggaagaagggaacgatataggtcgaataatcgacgagataggaaaagtaaaataacataaatctacaaataaacatgaatataacccctactaatataaatacatattcgcctaatgagatactaaataattttgccaatatttttgagaaatccagaagtataaatgaccttgtatctataaaaaacggtttaaatctatctgtggacgtggatttgcagcgtttcaatgatgagcaaaaaagtacatttcattattttttggcaaatggttggagttatgtattacaactaaaatatccaaactcttacgaagttcccattagttccaaagagtttgaaaaacaagtatatcatttacgttgtgctttgcaactcattggcaaaagagaagatattaatgtttgtcaaatcctaactaatctgggatgtgcttttgaccatatcgggcgtttctcagaagcgcaggactatttcaataaagcacttttgataaatcccaattttggcatggctttggggaataagggtttgggattataccgatatgcaagggaagttttcgacggggtacatcaatttatatttttgcaatatgcccgaaagcatttactggaagcatgtgataaaaaagatgtttacgaagaagcccgttcagggtttaatagtttggcggaacacattgccacaaggtatccattaaaagacttgaatgatttcaagcaatatgacgatttctttcatggattatcaacggatgaaattgactatagacagtggtgcattgataatgtattatttctaaatccactaaatgatgttatagcccaaaatgttgttgcacacgatattctgcatactccaacaatggtcttgaaaagagaagaaaaaccaatatgccaatcgatgtataatcaaatgaagcaggaatttgtttcagcaaggtttctgttctatgaaggcgtaaatactgataaacctcattattcagacagagatgttgtcctttatactgcttttgattgtccggtctatgccatttccattgaaaaaataaaaatatcctttcgcgtttgctattctatttttgataagatagcctatcttatgaatatatatttaaacttgggaattgataaaaatcgagtttcttttagaaatatatggcataaaagaggaaataggaataatccgataaatgaggaaatgtttacctctcaaaatttggctttgcagggcttattttggttaagcaaggatttggacgaaggagtagattcaccaatagaaccggaagcgaaggaaatagcgataatgagaaattttatggagcataaatcatttaaaattgttgaagggaaaaatatttgttggaacgaatcaccggaaacatatgaaattgaaaggcttgatttttatgataaagcatttaaaattctgaaacttacgaggtctgcattaatctatctttcatctcttatttacgaagaagaaagcttccgaaagcctttagagggtttaaccaaaacaatagatatgccgataataaacgataattctaagatataatgaataatatggataatcttgatggagataaaataatcgaagaagcggagaagtctttggaacgcctttcacgtaaaatagaacaattggaatacgattccaaaagagatgtgttaaaacatttcgataggttgcatgataagttgttcatgttcaatacaatttttattacaggatattttgctttatgtcagataaataaagaatttaatagtctgatattgttgttgccattttgttctctttcaatgctgatttatattgagcattttatgaaagaaatcgctcgcaagcagtcatacggtatgtttgaagtaaatttatctgagcatttaaataaagcagaaaagaaatatggtcaggtcaccatattgtcgttacttattataattgtttcagccatagaactgttgtacacaatatatatttgcatctttagattttagtatcaaaaataaacagtattaataaaagcggctatgccgccgttaaactggcaaaagttattctcggacaatcggttattctcgcggggcttccgccctccaaaacgggcagggaagccatgagcgggaaataaccgaagttggacgggaaataacttttgacacaatataaatctaatattttatcagcttaatcttggtctccgtttcttctttttcttgggtttcagcggttgttgctcatccattggattgacatccgcagccgatggaagtatggacaataaagaagataaaccgctttcatctgtttgcgtattggttggaatatttgaaaacgtttttacatttttatttatttgtgtttttatattttcatctgtttgaacatagacaatttttttcttttcaccagcaaaatcttgtttgggggctttcagttcccgttcctgcatccatagtttatccgtgacagtgccgttcttcatagtgttgcagtattcaaaagtttcgggtagttgccgattataaccgaatagattatcaaaacctttctccacgttctcaaataaggcgatacggtcaaaaccgcctgtaataacgcctttttgggtgtttcgatgattggtaagcgggcttatcttgactttgttcgattggtctttacggctcacaatcaaatggcagtgtatattcagacggttgtcggaacagtttcggtcgaaatggattttgccgtaaaatttgatgttttcggctgataatcctttattgaaattcttggcatattcgggaatgaacacttcgcggatataccgcttcatggcttcggcttgttcctgttccgtgcttcccatcgcttgcagttccttttcggacgggctgacgtgaacggcgtaaaacttggcatcagtctttaagagttgcccgatattcccgtcaatgtctttaatcacatgggatttatagacattatcatccgtaaggttgaaaaagccttcggtatagattccctgctccatccgttgcaaatcttcatgctcgcaatagttggctaactgtcggctgctgcctgcattgttatacactccgttggacggtggcgggaaatcgatgttcattgtttgctattcgtttatcaggttcgttatctcggctttcaggctctctttgcgcttgccgtccatcactccgcaagctgccaactccgcataaaggctaatcaacttcaaaagttttgcattgtcttttttctgcgtctcttttaacgcgccgatatgtttaccctgactgtttatcacgtcggcatgttcgccgaatttgtcactgattctttgcagcacggcattgtgtttctcttggttcttctccaactgcgaaagaacaagtgtttccaatgctttcacaatactatcgaagcggacggctatcgaattggtcgcccgtatcatcgggttaagttccttttcctcgtagttacggataaaacgtataatagcatcctgccgtttgttgattttggcaagttcggctttgaccgattcgggggcatcggcgggattgatatttgccttgtcgatataccgaaaagccagtttcactacttccgcctttttcagcgaatagtgtttacatatcttttctactaagccgcccgtttccttgtctatggaaacggtggtgaatatggttttcctgctgttattttgcatgagtaattacaattttatagaaattcgctctattaatcacctgataataagcaataaactaaaattgattattacaggtgtcattacagcggtttcacttaaaccgctaaagccgaaggctttgccccgcggggcaagaaggaagaacaggacttgtccagttccctcttgcttcatttagcgaaacgagccgagccacaaggtgaggccgtttctgctaaatggggagcgatagcttttcatcaggcggtaatattacccaccttggtttgcctcagtttgcttatcgagttggttttcctttttgaaccgttcgtatgttttacagtcggcattttcttgaataaatacccgaatatcagcagcacgataataggttttatgacttatcataaagtaaggaagtttgccacttgcccgatagcgttgcagggttcggaaagatactttcagcaggaaagctaaatcctgattatccaatatcttgtcgctaggatctaatatcttgtcggtattgataagggattttaggtcttgtccgatttcggagagcttttttgatagccgttccatccacttgtcgaagttttcgttgtctatatacattttgcttcatttttaagtttaacattattggtttcaatcgattgatgaagcaaagttcggcaaatggatgaaaataagttaggggtgtaccactggtacacccctataaatagttgttaaatagttgatttatagatagcctttctttttgctttcttcattaatggctttacgaagcgtatctaaaaattcggttatttttgatggtttacgactaacgacactttcatgcttcttatgcacatcgcccaatttaatattgaaaaggtattcaaaggctcttccgatttctgtaagtggtgcttctgtaccactgcgcgttaccactcttttagataggaacaatccactaactatctccataatctcaataagataggtttcgtctgtaaggtagagcggcgagagtggaagtttattcttccggttttggaattgaaccggatatttaatttgcatattgagtatgcggatttccgtatttacaagtcctatcgcttcatcaataagcaatgacaaggcgtttttccccctgctcaaattgtactcgatacgacttgagcctgtttagtccaaaagagaagtaacgtaataatacagcgtagtcctgttcctttatagcaatacttactaagtgattggcaagttcttgcaatgcggccgtaaaatcatttacggcaaactctttctgtgagtgttccgataatagtcggaaaaatctcaaatctgataagtctttcataattaatacatttacatattgataaattgcgttgctttgctgaggattgcgttgatacaattctcccgtagccagcggtttgaatgagttttttcataccggttatattttgttgtatttataatttacggttattttttccaccaatcgtccacctctttgctcggttgtaggtttcccacatacgagcgtattctcctttaagagcaagtagctgctcatgtgttccctgctcggctatcacacccttatctacatacagaattcggtcggcattggtgattgtagacaatcggtgagcgatgaccaataccgtctttcctttgatgagatgagagaatgctgccagaatcttaccttcgttttcggggtcggcaaaggcggtggcttcgtccagcaagataataggggagtcttttaatatggcgcgagccaaggctatgcgttgtgcttcaccaccagagaggtagatgcctccttcgcctaccaatgtctgataaccattgggcaaggattctataaactcatggcattgagcggcacaggcagcccgtgccacttcctcaaaggttgcagtcttgttacccatacggatattctcctcgatggtatcgaagaagagcatattatcctgaaagacaaaagcgacgttgtccatcaacaccgaagtgggaatctctttgactggcactcctcctattaagatttctccgctttgaacgtcccaaaagcgggcggcaagcatagcaacggtacttttaccggctcccgaaggaccgactaatgcagttatcgtaccgggatgggagatgaaagatatcgctttgagtatcggcgtggtgtcgtaggcaaaagagacgttgcgaaattccactgaagcgtctttggggtgtcggggaatgtcaggctcttcgatttcgtccatatagagaatgtcatcaatcttctgtacacccatgttgttctgattcagaaagctgcctatccacaagagtttaagcacgggaaagaaaacagccacgccgaaaaacaggaacatgagtagcaccggcacgaaagtggcatacgaggcactccccacaaacagccacactgccacgggaatgatgaagagcagtgccgaagagagtatggtaaggaaacctacatatgtgggttggtattgtacgtttacctcgttggcaaatttgcggtactccttgatgtcgtcattgagtttgcgataggcattagtcgattcggtgaaggtcttcaccacctgaataccgcgaatatattccacaatactagcattcattctgcctaaggtctccacataccgtttggaaacctcccggatttttttgccggtgtacattcttcccatcacatagaatgccatcgccagcacagccaatactacgatagccaaccgccagtctacggcaaacatatagctgacgagaatcagcggaaaaagtagggcagttacgatgtcagggatatggtgggcaataaacagttcgatgcgctccacgtcgtcgctcattattttcttcagttctcccgaagcccggcgggaaaagaaccccaagggcaaacgaaccattttttgtactagctgcattcgtatttcatacagaatgttgaaagcggcaatgtgcgagagcatgagggaagcaaacgtgagcactccgaaagcgaagaaagctcccaaggcgatatagctccacagccagatgtatgccttgtcaattaatgagggatcaagcgcatgctctgccaactcgatgagaatattgtacaccgctatgatcggcacaaactgcacgatggcggtgataactgccaacaacatcgccccgatgagcagccgacgtttagtgccggctatttctatcaaccgtgccagcccggtcttgcgtttatttgtatccatagccttactgtttattcgattgtttgaacttccatccttttacccgttgttgttcctcccaaagattgcgatacagtccttcctctgccaaaagagcttgatgcttgccttgctgcaccacccgtccttggtctatcactacaatattattggcacctatcaccgtgcccaagcgatgagcgatgatgactacagtcttttctttcaccaagtcgttgatagcatcttggatgtgaacctcgttttcgggatcgagcgaagcggttgcctcgtcaagcaacacgatgggcgcatctttcaaaatggcacgggcaatagagatacgctgtttctctccaccggatagtgtgctacctccttcacccaccatcgtttcgtagccatcaggcatagcggtgatgaagttgtggcattgcgccttgcgtgcggcaacttctatctcttcgcgggtagctgtctcacgtcccacgcggatgttgttataaatggtatcgttgaagagatacacatcctgaaagacgatggaaacttgttgcatcagtgtatgcacggtgtagtctttgatgtttcgtccgccaaataggatttccccctcgcttacatcccagaaacgggcaatgagtcgtgtcaatgtcgttttgcccgaacccgatggtcccacaaaagcggtcagttccttttcgggaatggtaagcgatacatcccgaagtacgggaatatcggcattatagctgaagctgacgtgacggaactctatctctgagttgacaacatcttctattataccctccggaagtacgggcgttttgcaaagagcatcaatgcgttcggctcccagcttcatgtagttgatgagggcgataaaggtcaaggcgttgatgagtggggcatagatagccgatcctgccagcaggaacatgatgtaaacgggcatggagactttggcatttaacaacatcgagaagccaagtagcataataagaaccaggccgccattgagcagagtggaagccagcgtgatgctgggtgcgggagccgcttccaaacggatgctctcccgctttagatcacggaaagctcgttccaagcgttcaaacttattgccgctcaggttgaaagccttaatcaggcggataccttgtatatactcgatcatgcgcgaagcggcattggtctttattttttgatgcctcttgcccaaggttgccacaaagtgattggtgagccacatcatggggtatgccaatggaatgacagctgctgccgccaaagctaattgccagttgaagaatgagagcgaaaccaaagcgacgatgggcatcgccagcccgccaaagaactgaccgataaggtgagtagtgagcatctccacgttgttatagtcgctgacaatgtatgccccgatgtcgccgggatcacgactattgaagaaactcatcggcagttggcgcaggtgattgaccacttccaaacgaccatcgcaacaaatgtcgtagccgtctttataggctacaaggtatgcctttttgctaatgagccaaaggcaaacgagagaaattaggagcattaggcacgcccaacctatgttcacgaggttgagcggtgtgccgggattttgcagaggtttgaatacctcccacaccacgagcagcattgccccatacggtgcgccacgaaaaaagtactccgcaaccgtccagcctatcagcggacgcaagcgacggggctgccccatcgtggcggaattgagtatttgagagagattgttcataaggttgctatttgagtaagaagtatctgggagttctcgctttgtaccgcgcatagtcttccccataagtggtcatgcagtatcgctcttcacccaagataacgccatgcgtgacgaggatcaaaggaattgtggcaggcagcaaccacaacgatgccgaggcaatgcaaaccgccaatgctcccacttcatagaagaagtacatcggattgcgcgacaggcggtaaacgcctcgtacgacagtttctcctttaggcgtagaggcataagcatgaaaggctgccataaatccgacaagtgcaaaggcaaacaagacgcaccccaccgtgaatagcggtgtacctatgcggagagggacaaagagcgacaccaaaagcaatgttccctgaaacacaaagcttaaagtggcgtaccgcttgtccttagaggtataccaagatgtatctacggcacgtttgccaccttctcggtaaagaatcatatacaaaagttgtatcagcaccaatgcaaacgaaggtatccatgcattgagccaaccgaagtgaaattgaatgaaatcgtttattggcatacgaaattttatttattgtgtgtgatattgaaacccttgaatagccatttctgaatggagaaacaagattaataaatgtttgggctaaaaaatgagagcaaaggaaaggccgataattcaactctcacctttgcctcttctgagtgattgattattacttagttttcaaaccaatggaaatatgcaggagctccatctacctttactacggcatccgagcttgtttcgccggttgcaggattatgcgtataaaagcccacatcatttctgccattaatagcaaacacgataagattcttgtatttctccactgctcctccaaagcttgacgtcatcggtatcggaagtttttttaccgttttattgtaaatatccatctctacactgatgagcgatttatccgtgaaccagttgggagatgttgggtttgcccaataagaaggaatatccatcgtggcatacatttttccgttgccggcgtattgtgattgaagcagccaaacggttttgcccgattcgccttcgattgtttgatcgttcaacacccaattataggtagggtcaaattcggtttcgcctttcttgatgcgcaagataccggtcttgtacttaggattcatgccgtatgcgcccgtgcacatcagatacatatcgcctttttcatcgataaaggtttgttgcccataggtataagccccgataccgataccactcgccttttcatagatgacacgctccaccttgtccgtttgagtgttgattaccgcgagttctatctgaggttcggtagccggttggaatgtcatgtctgtctgattcagtgttacatacaaacgtccattatgcacaaacggagatccaaacatcggtacggccaatcccggtgcagcgtaagaggacagatcaatctcaccagttagttccatcgtttgagggttgaatataaataacttgccgataagtgatatcagataggcttttgttgcattaacaaaagagatgtgtcttggaacagaattaaggggaataggcatggttgccgttttggtgagtttagttcccgaacgcccccattttgttactacattttcatcaccttgtgctccgaacgcaggaaaagtgtacacatcattaccgttgcacactggcatcattccgtaaccgacttgcacggcatttttgtttgtcagtttcttgggagacactccatctgctaactgcatccaacctgacccggtctgtccaccgggattcataagcatggtgtaaacaagtatatcgccaacttttacttccggatcggtcgtgattggtttcgtttccgggtctttgctacaagctgaaaacagcatagtgatactcattaggaggagtaatactccgttgattctctttttcattttactttttattttattgttgaataatatattgaattgtgattagctttatttcagcacgtacctgatacgtgcggtaaaggctctgccgggaagcgggtaattaaactcgctgaacaggcgggcattcgtaaggttggatgcttttgccgagaaggtaagcccaccgttcatgatggagtattctaatcccaagtcgagcttgaaagagcgcggaatgcgtttctcttgatattgacttacttcgaaatcgaagaaatactcttctacgaatgaagcatcggtaaatagtcttacattctgacctttccctccgaagagattctctttgtgaaactctacccccgcatttgctaagaaatagggaatattaggcatacgcaatcccttcgacggattgagaacgttactcgttggttcgtacttacgtgtatcgcgaaggtcttgaaacgtggcatttacatatccgtaaagccagcgtgtaacatctgctttgacttctgcctctacaccgaaggtacgcatctcaccgaaattagtgtatctgccctgcacgaagttgcgcgtatagcgtatcatatcttgcaggtaagagaagaatccgtttacctccacctgcaacaatccggaaccaatctttttatcgtacatcaatccgatgttagcgttagttcctctttcgggtttcaagtcgcccgaaggagcaataaggaagccgtcgccaatgagttcggcatctgtcggtagtcgtacatcatagcttacggaggctttccccaacaactctttggtgaagcggtagcgcaaggcttcacttacaccccaatcgtgctgctgcatatccacttctttgggtacggaattccaaacatctcctattttcgtattcatggaatagtaataatacttacccgtcagcgagttgaggaatttgtcattgggggatttatagtcgtaacccaagcctaatacccagctcgtcatgtgtgagtcgaagtttatctgtcgccccaccgctttatccaacaacggatcggagggcttccccaatgcccatttgaataatgagttgaggttgatggagtgccggtcattgatgatgtaattgagattggtcttatttcccacggtatgcttacgcattttcatgtcagagggtaaaactcctatttctcctccgtaagccgaaacaggcggataaggattcatatcccagtcgtagcgaagcctagctgtatccacaaagttgtattgagaataggcatagcccgtgccgctactgaagtcaagtccattgagtaggaaattgtctttctgtaaatcaatggcgaagttgtaagctccggcactactttcggcagagcgtatgttctctaccacgccttgtatctgcttgctgtttcggataaattcaagttcaaactccatctgatcgaaccaccatttacgggctttcatcgatatccctccccccgattggttgaatttgtcatggtcgcgttttatgaacttacctttgttctgaggcaattccatacgatagtcattatcagaatgggtgtataacaacgctgcccccaactctattccttgtttgaccagattccgcttgaagacgctacttgctttatgtgtattgaagctaccgaacgaatacgaagcatccaagtaacgaggtggatactctttaatcacgatatttacagcccccccacggcagatccaccgaacttggctggaaccacacctttatatatttcaatgcggtcaatcatgtcgatgggtatatcgttgatgtcgatgaaatcggaattatcgttcatcggtacttcgtctataaagaatccaatacgcttgccttccaagccgcgaacagagatacgcgaggcactgcctactgctccctgcgaacgaatggttacgcctacggtcttagtcagaatatcttctacgctatttactgtaccttgtaactggctcatactgtaaaccgttaccggcatggcttgctcccgaatcttgcgggcttcacttttgcccatcaccaccacttcgtccagcgatttgacttcggctttcaggcggataatagttttctttacattctctttacttacggttactttttggactgctgtttgatagcccataaacttcacggtgaatgtataagtaccgaaaggaatgtctgaaaaagagaactcgccatatttgttggttacatcgccctttttcagttcctcaataaagagggttgctccgggcagtggatcttcgtcagtgttgtcgatgaccacgcccgcaatccgccccccacctgtttgggcggatacactgatgctcatgagcatcagtatcaatagagaaaatagtactttctgtttcattgtttatttatatgattgttggtttctccttaaatgctgggatcgggagcttccggcgtggaaacgactataggagttgtacctgaagagtttccttcggttactttttgtgtaagtacctcaacatccttaaactctattctggcgatcgcctctttggggttgagtgtcgttttgtcagcaatgagtttgggcacttcacgttctttcaacatacccgtagaacgtagcacgggataccatttggcagcttccttcggcttggaaagatttttgcgggctgctttgttataaagtataagcataaatcgatattgttttgtgccctttcgggcagttattagtagtaattttcaatatttgaactgtatatcttctcgttccatttctcctttgaggtatgtgagaagagtctccatatcgtctcctactgtaaaggcaatgctctcaatagtagtgcaatgccccaacgtacaagttgatacaggattgattaaagaaacataacgactgtctcgtttcaccagtcgatgaatcaactgcggataggtagtcagaacccgatgtatcggggtatatttattgatgctcatctgtctattggtttcatcatcggttgttttgtcgcttgcacgcatattcgttgcgattggctctccggcgagatgtcgtaggtcacatttataaatcccgcttgttccagcattctttgtatttctatgggtgagtaaatgcgcaggtcgatattcctcacccacttttcattgccttcctcgctgcatgcctcgttgcagatgtagaaccttccttcgggtttcaatacacgcaatacttccttgaagttttccactatatcattccaaaagtagatagtttcgaaagcggttacaatatcgaagcggttatcgtcaaaaggaatgtttgaaacattcgcctctactatagatgctcgtccctgactgatagccgccttgttcttgcgactcgcaatgtccacgcacgtgggtgaataatccatgccgcaaactaatccatgagttcgtttgatgaaattagctacgttttgcccaccgccacaaccgatatcgagcaccgtttcgccaccggaaagttttacgaagttgtcaatgcaccaaagagaaatccggttatgcccttggttcatcattttcacaatgcacctgcccataaagctattcttgggtttgcggaagttttgaaagatgttttttattatgctcataattattctttgtttttaagtcttttcttactaatatgatatgtctattatttgctgtgcgcgatacctaaaaaatatacgcccgtgagtatgctctttgtgagcatcgtgctcatgacagtggtaagtgtgagatgtatgcatatctttttctgttttttatttattgtttctatattacttcttcttgctaacccagcatcagcaggcttagtgccatgaccgccatgcctaccaccaaaccgtagatggcatggtggtgcttaccgtattcttcagctgcgggtaacagctcatcgagcgagataaataccatgatgccagcaatcatgccgaagatgatgccgaacacattgtcgtcgaggaacggagccagcacgagatagcctatgacggctcccaccggctctgccaatccagacaaaaacgagaaccaaaaggctttcttgcggttgcctgtagcgtaaaaaacaggaacggataccgaaataccctccggtatgttgtgtatggcaatggcgatggcaatgggtatggcaatgttcacatcctttagggcagcaagaaacgtaaccataccctccgggaaattgtggatagccagcaccaaggctgttaccatgccaacacgtagcaatttgggcttcacgtctaattgtattttcgctttttcactcatttcttccacccggtgcatttcatgcggattctcgtagcgaggaattagcttgtcgatgagcaatatcaacacgatacccccgaagaaagagagcgtggcataaaacgttccttctgatttgccgtgcatctccacaagtgtttgcacagaagaggtaaacagttcgacaaacgatacataaatcatgactcccgccgaaaagcccagcgatagagaaagaaacgacgtgttggtgcgtttggcgaaaaaagcaatggcactgcctatgccggtggatataccggcaaacagtgtcagaagaaatggaacaaatacttgttgtgacatggctatgacagattgggagttagtacttcaaaagagaacgaaaatctattttgttcaaaaacaaagcgagtcgctctttgcaggcgactcgcttgatacgatgaattattattattaaaaatgggatgtttcatacatctgttactaagttaagtctggaaaatcagtctctggacgttcaatatcgatgcattcttttttaattctaatagtctctttgttcaaagcctctctgggcagagcggattttctgctttgtgttacccacgattcctcgcagaggaaaagtccgtttactccttgcacaagcgttatttcgccgttacagatgatgttggtgatactcatatattgattgtttttagttgttctaccgaagtggtgcggtatttagcctcctgcaccaagcgaaatcctgcttgacaagacctgccgcatctgcccatgcaagcaacgggtgtcgggtcgaacagaagatggctaaagtgcttcttttccgaatcgaatacgaaagaaatccgattgtccacaattgtacaaccgcttccacaagggttgcattgtaggcaggaggatgtgtggatgtttctatttgttttcatctttctatttttacattcatgagccttttccagcctcctgtgctaaagcggatatactcaccaataaaacattcaatttcttcactggaaagctcttcatgttgcaccacctctttcatcatattaacccaccatgagcaggtgaagtgcataaagaatagagaaatatcggtatgcagatcagggtagagctttttcataccttccatatattctatacccattactgtacttcttttaatccattgttcccaataatcattgaaacgagagtcttggatagatgaaaaaagtaacttaaattcttcacgataccgtcttacgatgttcattacctccttcatggatgagcgatgatattcttcggaggtaaagacatccaaagaaaaggcctccgggcgattatgatcttccagcatactgttcatcgcctccaaaagcggatgcaacacgtcagccaacaaatcgtccttacaaggataataattgtagatgttgctcagaccgatacccgacaatttggatatttcacgcatagacacagccttaaagcccttcttgaaaaaggctctccttgctgtttccaacaataatttatgtgtatattcttttgttgtttgcataggtcagaacgtagttcctgttattagaatacaaagtacgttgtatttcaaaaataaaacaatccatacaaatgggtattttctataaaacaatccctatttgtagggatacaaaaaagggtatgtaactatcagcagagccacttcacgccaaaccatagtcataagtacgtgtattgcctctactgtatcctcttgttattcttattctgacctctttccatggctattgttaatacgcaggttataaatcatgtgtaaaaactactttaatcttttcatgattcccattttagtaatgattaatcgaatatgctaaaaatgtatcatataaaacttctcttttctgtcattctaccttttatctatttagcttgtcgccattaattaactcggattcattttgatagttgtgccgcaagagtattatgactaataaattattcatgtgtcattttgccataaacagtctttttataccactctcggacagtttagaaaacggctcttgattcttctttcatttgccgatgaaaatagaatcaacacgttttattaaccattaaaaattaaatgtatggaagtagtaaccatcgaaaaaagaacattttcgtatgtctgcgagagcttcacggagtttgccaaacggatagagagtttgtgcagcagtcatactcaaaaagtagaaaactggctggatagtcaggaagtgtgcctgttgttaggcttgagcaagcgaacgctgcaatattaccgaagtagtgggcgactggcttattctcaaatagggagcaagatttattataagtcttccgatattgaaagaattattgcggacagtgaaacacaaaatcagtcacccaaacaaatcaagccttatgaaaagaactaaagaatattatccgtccttcaacttgttttccattgtcggcacatgggaaagtgttaatctgaatcctacggttatcatctatcggaacgacaaagagtatcttctttctattatatatgtatcggaaaccaccaaacaggcttcaccctctacttatgaaatacagaaagacggtagccagtattttattgctcctgctcctaaacggatttacatagattatgatccagcgaaagatgtgctaaacctttcgtcattgggtgactatctgcgtaactaatcaatcgaccagttaatctctaactgattcgctatctagccatcttaaaatcaatatttcaataaaacaatctttcaatcatggaattaataaataaagatacaccacaagtcaaagaatttatttcttcgctcgactcaatgctaagcggtattgaatcaattgtcaagcactataagccccacctgaacggagaacgttttctttccaatcatgaggtttctaaaaaactgaatgtcagcctgcgaaccctgcaagaatggcgagatacaggcttaatcccctttatccagataaaaggtaaaatcatctatcggcaaagtgatattgataaactgctccaaaagcattattttgaaagttggaaagaataatctgccactcacaaaaacattgtttttcggaatttaatttgaatcattgacttttccagtgaagtatttagtctgtgcaagtctttagataaaaatacgctcgaaatgcaatgagaggaagatttttatctaaaccgaaggcttggacttgaacaggctaaatacgaaaattacctttgtcaatgcttcatattgggttctggaaaacttactttaaaagaaaagggttgagaaaatgaagttcattattcccaatccttttttctatattggctactgccttatttatatagccaattccgacaagcagctattcactttctgcatatcctttagaatattctgatccagtacccgtgcgtagtgtttcgtcacgctggtatctgcatgacctaacatcttggctacattttccatacttacgccatttgcaaggcacacggaagtggcatagctatgtctggccgtatgagtgctaagatttttatgaattccgcacacatcggcaatttctttcaaataactgttcatgcgttgattacacaatacaggtaaaagttttccggtacactctgccacatccttatatttatcaagtatagaagctgctacaggcagcacaggaatgttgcacatgatttttgtcttttggcggttctttcttatccaaagctcccctttgttgtcttttaccaagtgttcgggtgataaatctttcacatcgctgaacgccaatccagtaaaaatgcaaaagataaaaacgtcacgtacctgttctactcgcttaatcgtgaattcttttgcaagaataattttaatctcgtccatcgtcaggaactcaggatcggtttcttccagtttgaagcgatagtaagcaaacggatctttctttatccagtcgttttccaaagcaatacggataatcttcttcaagttcttcaatcgggtgatagctgaattctgcgcacaacctttttcaattttcaaaaaagcatcgaacttagaaataaagttggcttccaagttgtttagggcaatatcagataattgatattctttctttatgaattcctctaaatatcgggtagtggtttcataccgttgaacggtcttactaacgaagtccttaccgattagcttacggctttgttcgttatgctctctgaatacttgcaatagcgttttactatcttcatccaccccataatatagctttctcataagatcgactgtaatagtcttacctgtggattccagttctctataaatttggtgtatgcgagagcgtgtgatttccaagtagtggttcagttccaccgacatacgatcttttcctttggagttttcttttgcctgattccatagatttacaggacagcttctttttactaaaacatctaccatacagccgtttacagtaattctcatgcacacgggtgcttctccattctttaataatctggctttcttgataaagaatagcacattgaaggtttttctagccatttttacatcgtttttagagttacaaaactatgtattctcttccaaagtacgaccatgcaaaatgctatgaatcagtgagaaagaagctaaatcgtgggacttttttcagcctgatttatgtaccacgatttgcacaccaacaatatgcttgaaacggctattttctgctatctgccagaaaaaagaaatccctgataatgtctgattatcagggatttgcttgatttttcttttgttttcagtgatccgcctggggctcgaacccaggaccccaacattaaaagtgttgtgctctacctgctgagctagcgaatcaatccttatttgcgaatcagttatttcctgattgcgggtgcaaaggtagttacttttatttaatttgcaagtgtttcgtagaaaaaagttccaattatttttcctctttatcgcttgtttcttgattatcagtagtttctacttcatcatattttattctttctttgttgataataaagcgttgatagtaggaaagcatcaaagtggtcagaggcaaggcaatgatcatacccagcattcccattaatgaaccccagatagaaagggataaaaggatgatggcgggattcagtcccgtaatctttcccatgattttggggacgaggaaagtatcctgtataatttggacgatagcgaagactgccagtgcgcatgctataataatccagaaattctctcccgtatcggcagctttaaggatcgccaataggaccgtagggaggaaaccgatgatttgcaggtaaggaaccatattaagcgctccaatgaaaagccctagagcgatagccatcggaaaatcgataataaggaagcctatactgaacagaatccccacacaaaaggcaaccagtgcctgaccacggaaataccgattcatgccgtcctgtacatcatgtacgaggttggatgcgaaggtacgatacttgttgggcagcagatgcagccatccttcggctatgacttcataatccagcaatataaagattacatataataatatgataaaggaggcgagaatgctgaacaggatattgagcgactccgcaagcagggcccacactctgggcaccgtatctttgatggctgcaagaatattctcttcgcttaatatacggttgagcgcctgaagatcaatattctcatgaatgaattcggaaagattcttgggtacattattcccggctccattggtgaggtaggttaccagtaagtcattcatcctgcctatttccgaaaccatgggaggcaccaacaaatagaataaggatactccgacaagagtaatcagaaacaaggtgcagaagatagaaacaatacggctctttaaccgtagcttatactggaaaaacttgactaacggataaaccatgtaggcgatcaaccaggctataaagaaaggtaataacactccgctgagccgttccacaagcattagtatccctaccaccagtacacatccgatggaaccacgtataaaactgtcgaatgttatcttctttctttccatatatgttttaaatagagtttatatcttctgtccgtcctctccccgtgcacggaggtagcactccctgcaaagcggctcgtattcggctgtctctcctagaagtacctgcttgtcattcttgacggtacgatgagagaaagatgccagatcaccgcacttcacgcagatagcatgaaccttagagacctcgtcggcaatggcacataattgaggcatcggtccgaagggattccctttaaagtccatatccagtccggcgatgatgacacggatgccgttattggcaagctgtctgcatacgtcaatcagtccgtcatcaaagaactgtgcttcgtcgatgccgactacatctatttctgaagtgaacaacaggatacttgccgatgaatcgataggggtggacgcgatggaatgactgtcgtgtgataccacgtcttcttccgaataacgggtgtcgatggccggtttgaatatctctacacgctggcgtgcaaacttggctcttttcattctgcgaatcagctcctccgtctttccggagaacattgaaccgcagattacctctattctacctcttcttctggtctcttgtatgtggtcttctgaaaataataccatgtgatttttgtgctttcttgattaaataaatgaatggacaaaggtaaacaattcgatgtacaagaactgttaaattatccattattttaagttattgcataaattattcctacattcgcaccataataacaatggatggaaatgaaacagaagctattaacagatattgagctggatgttcatgagctgaagctactcatgaatacgttttctaaagagccgactcagactttgtctgaactgttgaagcggagcatcctacgtatgcaggagcgtttggagcagttgtcggaagagataagtgctgtgccggtggaagcctcgtcttctcttgtagcggaagcggaaaatgaagtccccattgttgaagaacaagcccccgtaatagaggaagtcgaatatccggtaatagaagaaccggttgtggaagaggatgaagcgacagctccgggagaagatgaacctgtgatagtacaggaaccgcagactgttgtggaagaaacagtaattgaggagcctgttgtcgaagacgaaatggaagagaaagaagcggaagatgagtcggaagacgatgaatcgcttctgataaaggagccgaaagctgccgtattgggcgaaagcataaagatggctgccggattacgtcattccatcagcttgaatgattctttccgtttctcacgtgagatattcggcggagaccccgaactgatgaatcgtgttatcgagcagatatcagtcatgagttcttataagactgccgtggcatttcttgcctcgaaagtcagcgtaaacgaagagaatgaggcgatggccgactttctggagttgctaaaaaagtattttaatcaatcagcataaaagtttatgggaaagttatatgtagtacctacgccggtaggaaatctggaggacatgacctttcgggcaatcaaggtgctgaaagaggtcgatctgattttggcagaggatacacgtacttccggtattttgctgaaacactttgaaataaagaatgcaatgcaatctcaccacaaatttaatgaacataaaacggtggaaagtgttgttaatagaataaaggcaggtgaaaccgtggcattgatttcggatgccggaacacccgggatttctgatccgggatttttggtagtccgcgaatgtgtgcgcaacggtatcgaagtgcaatgtttgccgggagcgacagcttttgttccggcattggtagcatcgggactgccgaatgaaaagttctgtttcgaagggttcctccctcagaagaaaggacgacagacacgactgaaggcattggcagaagaacatcgtactatggtgttttatgaatcgcctcaccgcttgttgaaaacgttgacacagtttgccgaatatttcggcactgaacgtcaggcaaccgtgtctcgcgaaatatccaaactccacgaagaaactgttcggggaagtttggcggaattgatagaacactttaccgctaccgagccccggggcgagattgtgatagtattagcaggaatagacgattaaaataacttcatttaaaaacgtaaaacgtaaacgtatgaaaaagttagcagttttatttatgtgcgcagccatgttggcttcgtgtgactttaaaggtggaagcaaagaccttaaggctgaaaatgactctcttttaatggaattgacacagcgtaacgctgaattggatgatatgatgggaactttcaatgaagtgcaggaaggattccgtaagatcaatgctgccgaaagccgtgtggacttgcagcgtggtactattaccgaaaattcagccagtgccaagcaacagattgcttctgacattgaattcatctccaagcaaatggaagaaaacaaagctcagattgcaaaactggaagctcagctgaaaaacagcaagtacaactctactcagatgaagaaagctgtagaagctctgactgctgaattgaaagctaaacaacaacgtatcgaagaacttcagactgaactggcatctaagaacattcgtatccaggaactggatgcagctgtcagcgacctgtctgctgccaaagaatctttggctgccgaaaacgaagcgaaagctaaaaccgttgccgaacaggataagagtctgaatgccgcatggttcgtattcggaacaaaatcagagttgaaagcccagaagattcttcagagcggtgacgtgctgaagagcgctgatttcaacaaggattattttactcagatcgatatccgtacaacaaaagaaatcaagttgtactccaaacgtgctgagttgttgactactcatccgacaggttcttatgaactggtgaaagatgacaaaggtcagctgactttgaaaattactaatcctgccgaattctggagcgtatccagatacttggttattcaggtaaaataaggtagacatacctggttagaattgccaatgtgctgattcctgaattcaagaaattagcacattggcttttttatttctcatattatatatcacggagccaatgaaatataaaaatctcttttttgacctggatgacaccatctgggctttctcacgaaatgcacgcgacacctttgaagaagtatatcagaaatattcatttgaccgctattttgactcgttcgatcattattacacactgtatcaacgacgcaataccgaactctggcttgaatatggagagggaaaggtgacgaaggaggaactgaaccgccagcgtttcttttatcccttacaggcagtaggagtggaggatgaggctttggctgagcgtttctcggaagatttctttgccattattcctaccaaaagcggtctgatgccccatgccaaagaagtgttggagtatcttgcgccgcaatataatttgtatatcctttccaatggtttccgggagctgcagtcgcgtaagatgcgttcggcaggagtagatcgttattttaagaagatcattctttcggaggaccttggcgtattaaagccttggcccgaaatctttcattttgctttatctgccacccagtctgagttacgcgaatcgttaatgatcggtgacagttgggaagccgatattaccggagcgcatggggtagggatgcatcaggctttctatgatgtgacggaacgaaccgcttttccttttcagcctacctatcatatccattcactgaaagaattaatgaatttattgtaggttttatggattaagtcgtatttttgttgcatctaataaatgtataaaatacgataacatcatggatagtacgcttctgccatttgctttactttgttttacttcgttctttacgctgaccaatcctttggggacaatgccggtctttctgaccatgacacacggaatgacagataaggagcggcagactattgtgcgccgtgccaccatcgtgtcgtttataacgttgatggtgtttgtctttgccgggcagttccttttcaaattcttcggtatctctaccaatggtttccgtattgccggtggagtaattatctttaagattggttttgatatgcttcaggcacggtatactccgatgaaacttaaagacgaagagattaaaacctatgccgatgacatctccattactcctcttggaattccgatgttgtgtggtcccggggctatcgctaacgccatcgttttgatgcaggactctcatacttacgccatgaaaggtatattgatcggaacaatcgctttgatttatctgttgacgttcttcattctccgtgcttccacccgactggtgaaagtactgggagagaccggaaataatgtgatgatgcgtttgatgggattgattctgatggtaattgcagtggaatgctttgtgagtggagcgaagccgatattggcggatattgtgagagaagggctgagcggtatctgcaagtagaagtctgtattgtggggaggaacggataagattacactcatgtgtaaattcggaaatggaaaataaaaagcgagcccgtttaactgcttaaagttaaacgggctcgttattaaaatagtttcagtgtattagtagccttcgttttgtttcagcttaccgttagatacattgatctcggaaaccggaataggcattacggtacgatagtcgtcatagttgatcggaccggccggaacctgggcattcgttactgcctttttgtttctccatgtatcccaggcgttatgaccttcaccataaagttccagtctgcgttctgtcagaatatcatcgatagtaacagaagcaacgtcttcatagccagctattctttgcttacgcaagtcattgatatagctggcaggatcagcaccacctgcttttaatgcagcttctgcggcgatcagatatacttcggacaggcggattactttcggattatttacatatatttctccgtcgcgtcccggatacttctggatataccagccttcgttatctccaccgtcgctttcttcagcaatcagagtactgcgaacatcttccggacgttcttgaaggaaagttttgaatccctcggtgataccggcttcagcataaccttcggcatgtgtgtagaatccgagagagttacgttgtgcattgtagagtgaggtaatcaggaactcgaaaatgctttcactacttccaactttggtccatactgtttcgtattcatctctggtgtacagcttgtatggagatttttcgattacatatttggcgtcctcaagtgctttactgttctcattcatgtagagatatgcacgggctctcagtgcacgggctccccaatagtcgatatgaccagcagttactaccttgctggtttctgggagattatccaatgcagtcttcaagtcatccaggatggtttcgtaagttttcgcaatagtagctctttctgctgtatatccggattcgaaaacttctgtagacaatacgatacccggatcgctggcctgtgcattacaaggaagtttagcgaacaagcgggccaagtcaaagtggaaaagtgcccgcaaagcatacaattcgcctacctgaacatcaacttcagctccttccagaccggatttcttaactccctccaaaactttgtttattcttgccagagaaagataaaagcgtttgtagaaatagtatgaatcagaactattcttagtagcctggtaggcatatacatcaactgtttgcttattgctaccgatggctttgaagtcgctgcctctttggtcggcgtacaagaagaaatcacctgcgtagctgccacgtggattagttcccgcgtctatagaagaagtctgagactcataaacaccgttaactgcaaactgtaaatcttcaagagtcttaatagcaccttctgaaggccattcactggaaggcactttgtcgaaagtatcgcatgaggatactgccaacgtcagtaatagaatgggtaaatatatttttttcattattcagtctgtttatagattataatttgatattaatgccgaatacacagcttctcaatgccggtgtatctgcttgacgataaccattgatcgctacatccgggtcaatgtttttagtcttcgaccacaacatagccagattgtttgctctgaagtagatgcggaagttggaaatgtgcttcttcaataccggcagagtatatcctactgtcatttctctcagacgaatattgtcagtcgatttgattgtgcggcttgagaatctgtcccaacgataagggttggcatagataggcatcgggttgtctactttatcacccggatttttccagtagtttccggctacatcttctgacaggttcatggaaccgattcttacgccatcatgatgagagaaatatcccggataatcgaacatgtcaccaccaaactgataagtgatcaggaatgacaggtcaaagtctttgtatgtgaaagtgttgctgaatccaccgataacatcaggcaatgcttttcctacaattcccttacctgcttcggagtagtcatttaccactccctttgagtgatcttcaggatctaaccagaattctcccaaacctgtttcaggatttacacctttccattcgggcagatagaatgtatacattgactctccctcacggtgcagatacatttctccgtctccatactggatatcttttccttcaggaagtttgtctaccaatgcacgttggtaagtcaggttgaagtttgaagtccatgtaaagttcttgttgctgatatttttagaattgagttccaattcgaaaccgtcgttcttcaatgcacccagattttcccaacgggagtcaaagccggtgattaatgaagtaggtacttcgaacagcaaatccgtagtcttcttattgtaatattccagagacagatttacgcggtcgtacatattccattcaattcccatattgaagttcttggatttttcccagcttaatttgtcgtttgccattcttgaccagtaaatagcaggagcacttccgtatccggaacctgtatacaggtccatgtaaccatagtaatctgagggcaagttaccgtttgtaccataagatgctttgatcttgaagtcggtaaataacggcatatcttgcataaatccttctttactcattctccatgcaccggatacagaccagaaactagcccaacgattgtcttcactcaaacgtgacgaaccatcacgacggaaactggcagaaagataatacttgttatcatagttataattgccacttgcgaaatatgacatcatgccggctcccaaggttgaacttgcagcttggtccggttgtccgttggccaattcgggatagtggcttgaataacgtttggcaacagttacaatctgcagcaggtctctgttttcaacttcgaaaccggccatcaagttcagattgtgcatatctttaaaagtatccgtgtagtttaatgtagaagagctggtagctacgcggctttcgaaggtataacgagaacccattccgctgacggaaccaccgttaacactgttgcgatcccaatattcaaagtgcttgttgtctacatagtcataaccaaagatagagttaagtgataacttatcacagaatttgattgttacatctgcattggtcatgctacggaacattttggtctgaatccactccagagctgtatcgctgtctttaccacctagcatcagatgcgggttggtaactttaccccatgctgcatttttattatatgaaccatcttcattctttaccggagcagtcgggtccattgcgaataaaatacctatcggagaagaagtacccattccttgagcctggtctccctgatcgcggaaaccatcttgcgatgtagcggctatcatttgcttgagagctacgttcagccagttatttactttgtgattaacgttcagacgaccggagatacgttcgaagtcactaccaagaacgataccctcgctcttattgtagccaactccggcatagaactgagtctttgacgaaccgccgttgatagatacctggtgatcttgagtgaaagcagtacgatagatttctttcttccagttcgtatttactttaccggatgggtcatggataaagtcagcaacagtagccggtgagtcgagcagaggaatgaacatatcacctccgttatcgatgttgttcaatgctgcttgtttgctatctgttattccgtaagtaaccagacagttggctaatgattcgcgagtgtagtcaatcaagtcggctgatcccatcatattgaaagcatttacagccatcttgttccagcctacttcacctgaatagctgacattcgtttttccttctttacctttctttgtggtaatgatgataacaccgtttgcggcacgtgaaccgtacaatgaagcagcagcggcatctttcagaacagtcatgctctcaatgtcttcaggattcagtgtactcaatacgctttgagtcttaccgtagtagttcatgtcgtcatcagcctttgttacgacaccgtcaataacatacaacgggcttttagaagcactgatagaaccgacaccgcgaatgttgatttcggccatagatcctgggtcaccagttgctgaggctgtgcgcacacctgccattttaccggacaatgccttgtcaaaagattctttggaaccggaaacgattttatctgccttaatgacagcagctgatcctgtgaatgaagacttcttcgcagtaccataagccacaacaataacctcatcaagattttgtgcatctgatttcagtgtaactttcaccattggcttgattgccacttcttgtgtttgcataccaatatacgaaatctgcaaagtctttgcagaact

SEQ ID NO: 91 - DNA, 1433 bp, Bacteroides thetaiotaomicron
  source 1..1433: mol_type = genomic DNA
tgatgtgtactggttttagttgacaacttcgtttgttataactgaattagtttactcaatatactttaatatctaaataggtttacttttgttattcttattcctatgttagttgtcttttgttggtgcttgcaaatttatgcatcttcctttatttacgcaagccttcttcaggaaaatgtaatgttgccaacaaccaaaaactcttcggtcggggatcgccctagcggcaaggggcgggaccacccgtcccgacgagcgggtattatgctgttaatcctcccgtttcgctgaccacttccataggtgtcctcatgtttatcccttgatgaggccgcacatgattatatacatatacagcatcttcaatgcgcttgcttacttgctcgaagctctcatcatcacagtcgaatagccaaccgtttttaatggtgttgttcattctttcagccaatgcattatgtaaaggatcaccacactgcgtcatactgatgttgatttgatgctctttaagcctctctacatatttatttgagcaatattggacaccccggtcggaatgatgaataagagtgctcatgtctatgtgatacttctcatagaatgatattgccatctccaaagctttcaagggcccctccgtctcaagagttttgtaaagcgcatatcccacgatggcacgacttgacgcatcggtaagcaacgagaggtaagcccagccctgaccggtgtttacgtaggttatatccgccactaccatagcgcccaatcttgtagcgacaaatttgggtgcaacattcaacagatcggggtagatatagtaattatggttcgaattcgttgttttaggacgcttgcgacttgtacgttgacacaaaccattggagcgaaaaatgtcatagcaacgatcacgaccgataaccatctttggtccaaacttactcacgcagcaggcgtataactcgcgcataccagctttgggcatgagttccaacagttctttgcagtacaacacgatgcttgtggtaaggatatcaacctccaaatgtcggttcacatgcttgtaataaccttgtcgggttatgccgaagtaatcacagaggaactttatacaaccacgtttgcgtcggggtgagtgcctctgtgacaaggtgtcgattacttggcatcggagttttttcgtaccttgatatgatacgtggattcagcaagattgatgagttcttcgcacgcctcgtgacgtaaactctcatcagcaagagcccgatgaagtttacggttctcagcacgcaatagcgatagttctttctggagctcagaaatactagaatcaatagcatcgctatttactggtttagaggatctacccatatctttgtcttctatttgatacttgttaagccaataagtaagaagcttggcacaaaagccgt

SEQ ID NO: 92 - DNA, 152 bp, Bacteroides thetaiotaomicron
  source 1..152: mol_type = genomic DNA
acgcttacaaaactcagatttgctctcgggacttgataaatactcacgaatataagacattcgttcatcatcactgtaatagttgtactgctttttcgaatatttcatctttattttcgatttttgaagtgtcaacttattcagtacactac
